United States Patent Application Publication US 2025/0268953 A1 - sequence listing, part 2

SEQ ID NO: 9 - DNA, 3734239 bp, Alistipes finegoldii (residues 1-1,867,120 of 3,734,239)
  source 1..3734239: mol_type = genomic DNA
caaaattattcacaactttgtcacatcaaaaacagtgcaacccttatcatgttaaacaacgcgcaaacatatagcgatatgtggcagaactgccttgaccgaatcaaggcccagacctccgaagaggagttcgtgaaatggttccagccgatcgtaccgctcgaattcgacggcacgaaccttcgcctgcgcgttcccaacgagagctacgtccaccagatcgagaagaactacattccgttcctgcgcccgatcatctcgcagctctacggccagcagacccggctgcactacgccgtgccccgttcggccgctcaggccgtacccgtcaccgccgacgccgacaccacggccatctcgcgtttcaacacgcagaccaataccgcaaatataaagaatcccttcgtaattccgggactcaagaagataattatcgacccgcagctcaatccgggtctgacgttcgcgacctttatcgaaggcgaatgtaaccggctggcgcgctcggcgggcatgtccgtggccgtgaatccgggcaacaaccccttcaaccccttatatatatacgggaactcaggattgggcaaaacccacatcgtgcaggccatcggccacgaggtgcggcagcgccatcccgaactgcaggtgctgtacgtctcgatgaacaagtttcaggcgcagttccagacggcctacaagaacggcgaaatccccgatttcatccacttctaccagatgatcgacgtgctgatcatcgacgacattcaggagctgacgggcaagacgggtacgcagaacgcgttcttcaacatcttcaaccatctccagctggcgggcaagcagctgatcctcacttcggacaagccgcccgtggagctgaaggacatcgaacagcggctgctgacgcgtttcaaatggggactctcggcccagctcaatacgccggaccacgaaacgaaactcaaaatcatccgcgtaaaggcccagaaactcggcgcccagatttcggacgacgtggtggcctatctggccgacaacatctcggccaacgtgcgcgaaatcgaaggcgcgctctcgtcgctggtcgccaacgcctcgttcctcggccgcaagatcaccacgtcgctggcaaaggagatactgaaggtatacgtgcagctctaccagaaggagatcaccatcgaccacatcatcaaggtcgtatgcgagtacctgaacctcgatttcgaacgcttcaactcgacggagcgcacgcgtgagatcgcgcaggcgcggcagatcgccatgtacctctccaagcagcacaccaaagcaccgctcacgaccatcggttcggccatcggagggcgcaaccacgctacggtgctccactcgtgcaaagccgtgtcgaacctcatcgaaaccgacaaggcattccgccgccaagtcgaagagatcgaaaagaaagtactcgcacaatagtgcagcacataccgtaacacccaaacagagggccgtgacaggatatgtcacggcttttttatatctttgcggcatgagaaaagtctatcacttcaaaatgctccggacggcggccctgatacttataggcgcccctgcattcggagcggccggcttgctgctcatccgcctgcatcccggcaacctgcccgtaaggatcgtaggctatgccggcatactctttttcggaggttgtttcgctgccggactgctcgtcctccgacggttggcacgcaacagcgaagcgctgacactcacacccgaaaaactcacggtccgccaaccgaacggcagagagtacgcgctgaaatggaacgaaatccgatccttccgtgaagcagacatcaacggacaaccctttatcgcagtcatcacctccgaaccgcaaaagccggccgtgcagagccacaacaggcttcgcctatggctgagaaggctcgacgaacggctcacgggttcggcgatcaacatttcaccctcctccatccattgcaggcgggacgaattatacgcaacgctttgcgaatacctcgaaaaatacggacgataactcatcatggaccaatccaaactcgaacgcctgctgcggctgatgaaactgctgacggcaaacaccacatacaacatcgaccaactggccgagcggctgcagatgtcgcgccggacggtttaccgctacatcgacaccttccgcgaagcgggattcgtcatcaagaagagcggcaactgcatccgtctcgacaaggaatcgccccatttccgcgacatctctcagctcgtccacttcaccgaggaggaggcggtgatactcaaaagcgccatcgagaacattgacgacacgaacatgctcaaacagaacctcaagcgcaaactctactcggtatacgacaataaaacgctggcggacacggtcgtacggggcaagaactctccgaatatccgcacgctcatcgaagccatcgacgagcatcggcaggtgatcctgcacggctaccagtcggcgcacggcggcgaagtccgcgaccgcagggtagagccgttcgcctttacgaccaattacgtgcaggtgtggtgctacgatcccgaagcgcatgcctgcaagctcttcaaaacctcgcgcatcggctccgccgagctgaccgaagccccgtgggaacacgaaccggaacactgcgaaggtttcatcgacgccttccgcatgcacggcggcgcacgccgccgcgtacggctggagctgggactgctggcctacaacctgctctgcgaggagtacccgctggccgagcgcgacgtccggccgctgggcaggggacgctggctgctggacaccgaagtggcgggattcgccggggtaggccgcttcgtggtagggctgctggacgacatccgcatcgtcgattcgcccgaacttaccacatatatacacaattatatcagagcgaatatttcctgagccgcgttttttcgctacatttgctcttgcacgaatactaaaataccaacacctatgaaaacaggcagtatattgacgggagcattgtgtatggcacttgccgcaggctcctgctgccggcagacgccggcggcggaaacggcggggaagcaactgacaaccgcggaaacgatcgtattcaaggactacggagccgaaccgaccgtgctcgacatcgaaagctacacgcttgccaacgagaatttccgcaccgtactctggacgggcggcaacctgcaggtcaccgtcatggcgattcccgtcggcggcgacgtcgggctggagctgcacaacggcatcgaccagttcctgcgcgtggaagagggtacggcgcaggtgatgatgggcgacagcgcggacaaactcgacttcgtgaaagaggtcaaggacgactatgcgatcttcgtcccggccggcaaatggcacaacatcgtcaacaagggcgacaaaacgctgaagatctattcgatctacgctcccgcggagcatcctcacggcacgatacacaagacccagcaggagtccatggaagccgagcacgcgcattgaccggcggaaaacagaacgaaaaacgtgtgttttgaataaaaaacgcacgttttttatttcgtgtcacaacctgtcacacaaaggccgttcctttgcaacgtgaacctaaaagaaaaacgattatgggaacagcttacaaaatcaggtgccgccactgcggagcgcagttcgagcactacatgcagccgggttacggcgtcctgccgatgtgcgtgggttgcggcgaatacgtcgagaccgaaacggccatccggtgcccggcctgcctcaagagactcaacaccacgcaggaggaattcaacgagcagatagaggtgacttacatgtgggattagcgcgcaaaaagtcggcgcggaaatatggaaaatccgtgaaaaatttctatctttgaaaaaataaacccttttttcgaaaacacatgacacagcttcaggcgggggatatggcccccgatttcaagtccacgacccaagacggtgagacactgacgcttgccgacctgaaaggacagcgcacgatactttatttctaccccaaggacaatacgtcgggctgcacgctcgaagcgcagagcctgcgcgacggcaaggcggaactgacgaggaggggattccggatcgtcggcgtaagccccgacagcgagaagtcgcaccggaatttctgcgcgaagcacgacctgaatttcacgctgctggccgacaccgaccacagcgtatgcgaagcgtacggcgtgtgggccgaaaaatcgatgtacggccgcaagtacatgggcgtactgcgcacgacgttcgtcatcgacgccgaaggacgcatcgaacaggttttcacgaaggtagacaccaagaaccactatcagcagattctggacgcatacaaatagggcgatgaagcggttggggagcatattactcgtcgcaggctgtctttccggcaccttgcagccgtatgctcaggaatatccggccggccccctgtacgacactccggacgagttgtcgttcaaggcccgcgccgccgcccggacactgttgttcaaagaattggaaccgctcagtctccaatggctgcgcgaagaggcaaacccgctcctgcgcgcccggcggaagctgcggcaggcaattcagacccgcgcggagaaagccgcgaccaccgccgtgccgatggttcccaaacgcgacctgagcaaggaagtcggcctgtggcggatgagtgtcggcaacacctcggccgacaactggagtccgtatcccgaccgtgcgctggacgcccggaccctgcggttcccgctgccgcgcgactcgcgagccgacaagcggcccgacaacctaaaagccctcgacagaatgaggcagcagaaaagataaaaaaaagaaaaaataacagacaaagacaatggcagaaaaagtacaggtaaatgcggataagctcaaagtgctcaacgcagtgatggaaaaaatagaaaaagacttcggcaaagggtcgatcatgcgtatgaactcgcaggaagtcagcgacgtaccggtgattccgacgggttcgatcacgctcgacatagccctcggagtgggcggatatcccaaaggccgcgtcgtggagatctacggtcccgaatcgtcgggcaagacgacgctggccatccacgccatcgccgaagcgcagaaggcgggcggcatcgcggcgttcatcgacgcggagcatgctttcgacagtttctacgcccagaaattgggcgtggacgtggacaacctgctgatctcgcagcccgacaacggcgagcaggcattggagatcgccgactcgctgatccgttcgagcgccatcgacatcatcgtcatcgactcggtggcggcgctgacccccaaggccgagatcgaaggcgagatgggcgactcgaagatgggcctgcaggcccgcctgatgtcgcaggcgctgcgcaagctgacgtcgagcatctccaagaccaagacggtctgcatcttcatcaaccagctgcgcgacaagatcggcgtggtctacggcaaccccgaaaccaccacgggcggcaacgccctgaagttctacgccagcgtgcgcatcgacatccgccgcatgtcggtcatcaaggacggcgaggagcagctcggaacccgcacgaaggtcaaagtcgtgaaaaacaaggtggcgcctccgttcaaacgcgcggaattcgacatcatgttcggcgagggcatttcgaaaatcggcgagatcgtcgatctgggcgtcgattacggcgttgtcaagaaggccggatcgtggttctcgtacggcgaccgcaagatcggtcagggccgcgacgccgtcaaggaactgctcaaaaacgacgaggagctccgcaacgagatcgaaggcaaggtgcgcgaagccatgaaggcgcccaaagaaaaataggtatttatggattatactgccgaggatgaagtaataatcaaggaaaagtgggacgacctgctcctctcgtgtacgaagatctgcaagaacgacgaggactggaacttcatcaaaagagcatttttccttgccaaggaggcacatcagggggtaaggcgccgctccggcgagccatacctcctgcatcctattgcagtagccaagatcgtcatcgaggagatcgggctgggcgtgaaatcggtcgttgcggctctgctgcacgacgtggtggaggatacggagtactccgtggaggacatggaacgcatcttcggtcccaagatagcctcgatggtggacgggctgaccaaaatgtcgggagtcttcaacgccgacacctcggagcaggccgaatatttccgcaaggtactgctgaccctctcggacgacgtgcgggtcatcctcatcaagatcgccgaccgcctgcacaacatgcgcacgctgggggcgatgccgatgaacaagcagatcaagattacgggcgaaaccatctacctcttcgctccgctggcctaccggctgggactctactcgatcaaaagcgagctggaggacctctgcatgaagtaccgcttcccgcagcaatacgccgaaatcacgcagaaactcaacgaaacggaggcgtcgcgccgggagttcatcgacaaattcaacgccccgatcatcgccgcgctcaaccgcgacaacatcaattacgagatttcgggccgcgtgaagagcatctactcgatctggagcaaaatgcagcgcaagcagattccgttcgaggagatttacgacctgttcgccatccgcatcgtcttcaaaccgctgccgttcccttcggagaaaacgcagtgctggcaggtttactcgacgatcaccgacatttacacccccaagccggaccgcctgcgggactggatttcgatgcccaaggccaacggttacgaggcgctgcattcgaccgtgatgggtcccgacggggtatgggtcgaagtgcagatacgcacccagcggatggaggatatcgccgaaaggggattcgccgcccactggaaatacaagcacgccacgatttcgcaggacgaagacgagttcgacaaatggctgaagcagatccgcgcggcgctgaacagcccgacggaaaacgcagttgacttcttggataacttcaagttatcgctgtatacctcggaaatagtggtgtttacaccaaaaggcgaggcccgaaaaatgccgttcggcgctacggcgctcgacttcgcatacgacatccactcgaagatcggcaacagcgccatcagcgccaagatcaaccacaaactcgaaccgatcaccacgcagatcaacagcggcgaccagatcgagatcatcacggccgacaatgcccgccccaagcccgaatggctcgaaatagcgaccacggccaaggccaagcagtcgatcaaaagcttcctgaagcgcgaacgccagaacaacatcgagcggggtatgcaaatgctcgacgagaagatgaaatcgctgaatatcaagctcagcggccgtgtcctgcgcaagatcgtcccgatatacgaaagcaacaacaaggaggagctgtacagcaagatcggagccggcatcatcgacctgaaggacctcgacaaagtcctgaaagtaaactccaaaagcaagatactcaagttctggacccttttcatcaacaaaaaggaggacgaggagggcgacgacccggcggctatcaacgacgcgggcgaaacggcgccgaatgcagcgcacccggccaaagaacagccggaaacgccccagttcgagatagcggaatgctgcaaaccgattccgggagacaaggtcgtgggttaccgcgatccgaaaaccggcaacatcatcgtccacaaagccacgtgcgacgaattgaaccgtcttgcgacccagttcggccggaatatcgtcaaggaggagatcaaatggtcgcaacacaaggcgatgtcgtatttggtcaccatcgaactgcgcggcatcgaccgtatgggaattctgctggatctggcgaaagtcgtgagcgccgatttcagcatcaacatccgcgaagtcggcatccacagccacgacggcatcttcgaaggcagcatcagtctctatgtcaaggacgccgagggcctgcaggacgtgatgacgaaactgcgtaagataaaagggatcgagagtgtcaaacgaactttaagctgatatggaagactattcaaccgtaatatgggtcgtggcgatttttgcagccatgttgttcaacgcgacctcgcaggctcgcaaaaaggcgaaaaaacaggctcacgagacccaaaagcacactcagcacgaagcttggccctcgtgggacacgcaatctgcggatgaaatgcggcacccggacagtcaggagaccgtatccggagcggaaaccgaccgactgcgttccgcaatgcagcagcccgcaccgacgcccggattcggtgaagtcgcccgcaaaacggccgatttcaaaagctccgggcggcacgccggacgcaaaaacgctccggacggacggcatccccacgaagaaatcctgcacgaagaacacgcagcaggggacaagcatacgacagcggaggctgtagcggaaattacggaggatttcgacctgcgcaaggcagttatctactcggagatactcaagcccaaattcaacgaagaataaggctttgaagagcagcctgccgaaagacggcgatttccgcacagtgacagcaggcagatagcggaggctccgaacaacaacgggaagttccggcagcgctatttcgcagggacgcccaaaaaagcgacaaaaagctctgacagcaccatttgcaaggacatactgaaaaataatgggaaacgctctgtcggcacttttttgcgaaacgtatcgaaagtccgacggcctattttgtgggggggggctataaacaacgaggagcgacaaacacggcgaattaagcaggagggtatagcgccaatgctttttcggggtatatatgaacgcagggccatgtaaaccttctgtcgatcgggttggaccacggtgatcttgtcgatcccaagcgtcacggcttacggcgcatcctcgtgaaagatcctcacgggactaaactaagaaactttaaaagataaatatatggcatccattttttcacgcattatcgcaggcgaaataccttcctataaggtcgccgaagacgaaaactattacgcctttctggatatcaatccgctgacgaaagggcacacgctggtcgtaccgaaaaaggaaatagactacattttcgacctcgacgatcagacattggcaggcatgatgctgttcgccaaaaaagtcgcaggtaaaatcaagcaggaaatagcgtgttccagagtcgcagtggtggttttagggcttgaagtgccgcatgcgcacatccatctgatccccattaagagcgaaaacgacgtggattttcaccgggaaaagctcaaattgactccggaagagttcgaagaaatcgcaacaaaactttcgaaataggcagctgtttacaattatataaacaactgaaaaataggcgggtattgggttattaacactatccgcctattgtttatttaacataatatatcgccaatcaacgaaagctaataattcaggcgattatccgtcggaaatccgttaaaaaaatcaaaattttcctaaaatagggtggtgaatttacacttgtaaatacacaatggaggaagtatttccatttgtaattacacttgtaaatacacaagcgtcgatacatgtgttaatatatccatttgtaaataataggcagactggctctaaatagcgttccacgcataatcgaggaggtgtcaaatggttaaacattggagattaattcaattataaccaatgaattacaataattatatacaactctaattgatatatgcaaatatagcctgtcgggaataggggagtattgcatacacatggacatcatacagcatagacttactaatatccagctatttaaagtaaaatatatcaactaatacatgatatcaaccaccggaggtagatttaacaatattcccttcgttacacttgtaaactttttcaacacttattaacattttacaaatgcaaaaattacttgttttacaaaaaacaaatatttatatttgtaaaaaattctgttgatgagggaaaaattgctcgatttgatgaaaaatgaaggattgaagccaagccagctcgccgagctgctgggaatcaatcccgccggaatctcccatattctcgccggacgcaacaaaccgggcttcgatctgctgcaaaagattctccggaggtttccccggatcaacccggattggctgctgctcgactcggataagatgtaccgcgacgagccgccggcccaatcgtcagctccgcagccgatgagccagcccgcgtcgcccggcggcgaccttttcggccttgtctcctccggtcggcatccgcttgaagaaaaacggcagccggaaacggcggaaaacgaaaccgacgatccggcaccgcaacgacagctcccggcagcattgtttaccgctaacgtcaaacggatcgtcgtgctatatgacgatcagaccttcgaaagttttacgccgacgacaaagcgttaaaaaaattcatacgggctgcgggacggaatactcgattctcagagcgtaaaaaaaccggcttccggtatattccaaggtaacggaaccggacaagaaattgcggcgaaatcgcagacaatccaatcccgaccacccaccgacaacaaattaacaaggcaggtttaaaaacctgccttacttgcacatggcgcaaatttggccgccttaacttgcaaccggcgcaaacatcaacttgccgccttatttattcaacggattttcttcggccgcttcgacgccgcaatcgcaaaaatggaattccgaacgcgccttgtccgggggaaacaggaaataaacgcatacggcctccgtgcacaacacttcgtgccggtcatagatgcggacttcgatctcaacgatgttgcgacgctgccgacgcacggaagcccgcaaaacgatatggtcatcagtcgtgtgaatcggcttgtgatagcggacctccatcttcgaagtaacgccgctcgtctgaaacttccggaatacgacccagctgctgatctcgtcggccagcgttgcctgaatgcctccgtgcagcgtattcacccaaccttggtattcgggacgaggatgccagacgctcacgatttcatcgccgttttcgtaaaattccatccgcagtccctgcggactgttcggatcgcagccgtagcaatggtaaccgtccatgccgcgccaaggattcgttatcttcttcataatatgctattcgatcgttgcggtgcggaccgaatctgttccgtgatctgagaatcggttccgaaatcggcccggtataacaaagatagccattttcccgcgaatctcaccgtcttcggcaatgcaaatccggttcatttcatccggaatattattcaatcccgacaacaaagtcacagggaggaatcaacctccttggcgcaatgtttggtgtaatattcacattatgttaaattattgcaaatagaaggtctattttattcataatcgaatctttatacactattacatcccgattattcggcaaattgagcatataagcgctatcccgcaatcggacgatatataacttcaccgaatttttgctacttttgcaatatcaaatccggaacaaatggctgaaaatgacagctgtataaaacgctcggcaattatcctgacggctttcgggctgttcttcgtgacgtggtatttcaacctcggcgttcggccatttgcaaatttcatatctacttgcaaatcaattcactacatattgcattacctgattgcgagtataattccggcagcggcgcttctgttgctgcaccgacccgataccatattatataggctcggactgacgcacggattcggccggggattgctcttcggagtgctgagtacggtccccatgtttgccggctatgcggtcatcggcagtttcaaccgggaaacgccgccggatcacatgtttacgttcatagtcgtcgcgggattcttcgaggagctgattttcagaggtttcgtattcggagagctgttccggacagcccgttggggatttctgccggcagcgacgctgacggctttggcattcggatcgctgcatctgtatcagggtgacgacctgatttccgcatcggcagctttcggcgtcacgactgccggaagcatctttttcagttggatctatgtggaatcggagaacaatctgtggagcgtaatctggccgcatacgctgatgaacgcgccgtggatgctgttcagcgggagcgggagcggcgcagtcggcggattgtgggcgaacagcctccgcctgtgcacgctgctgatcgcaatcgcattagtcgtcatatacaagaaacggaagggactaccctaccatatttcaggaaaaacactgataatcaacagacaatatgtataaaaaactcgttttcatatttattgcagcgctgatgggcgcttgcacgccccgccagcaggcggacgaaaagacattgtatgtctcgatcctcccgctccgcagtctcgtggaggaaatcgtgggcgacgacttcaagatcgaagtgctggtacctctcggcgcaagtcccgaaacgttcgaaccgacgccccggcagttcatcgggctgaaccgggcggagatgatcttcaacgttggactcatcgacttcgaaaccacgctgttatccaagatcgaggagcgcggcaaggtcgtgaatctcagtcagggcatagaactgatcgccggcagttgttcgcacgcttgcacgcatgcggagcaggagacatccggcggacacggcacctcccacgccgaaacccacaaccatagccacgctcacggcgtcgatccccacgtatggacatcgccccgcgcattgcagaaaatggcgcagaacgcttatgcggccattcgccgggcatatcccgactcggtgaagtacgaaacgaattacaaacgactgcaggccgatttacgggcgctggacgcccgcaccggcgagaagatcgcgcagagcggcatcgaatacttcatcatctaccaccccgccctcacctattacgcaagggattacggcatccggcaggtggcgatcgaagcagacggcaaggaaccttcggccaagcagctgacgcaggtcatccgtcaggcccgtgaggacggcgtacggcgcatcctctatcaaagtcagtttccggcatccgccgtggagatcatcgcacgcgacatcgacgctgaatatgtcgaagtggacccgctgcgcgaagatgcgatcgccaatatcgacgcgataaccgacataatcacgcggcgatgaatctggtaacgctacgcgacgtcggcgtcgcatacgacggctacgaagccctgcagcacgtcgatctggagattgcgaaaaacgactttctgggtgtcatcggcccgaacggcggcggcaagacgacccttgtgaaggcgattctgggcacggtgccccataccggagaggtgcggctcgcacccgaactgttccgggacaaggagcggctgatcggctacatgccccagctatcggatttcgaccgcacgttccccatctcggtgctcgaagtggtattgtcgggtttgcaggggcacaagggaattttcagccgctatacgaaagccgaccgcgcaaaagcactcggcctgctggaaacggcgggcgtggccgatacggcccgcaaccctatcggcgaagtttcgggcggccagatgcagcgggcgctgctgtgcagagccgtcatttccgatcccaaactgctgattctggacgagccggccaacttcgtggacaacaaattcgaaaacgaactctaccgcacgctgcacgaactgaaccgccgcatggcaatcgtcatggtgtcgcacgacatcggcaccatctcaagcgtcgtgaaggagatcgtctgcgtgaaccgccgtgtacaccgccaccgctcgaacatcatcaccgaagagcagctgcgcaactacgactgccccatccagctcgtgtcgcacgggcacattccccacacggtgctggagcatcatccgggcgactgctgttgcgaccacgaataaaaagcgcgttccccggcggggaacgcgcttaatttatagaccggcctccatccgcgagcgtttatgcgctctcggcccgataccggaaatcggacaacggcttatttcttcgcctcgttgatcttgctcagcttctcgaaaagcttgtcataagcctccaccatctcgacgcgcagagcggcgaaatgcttgcggacgagcgaacggttgtgcggctcggcgggattgttggccttcgtgaagagatcgttgcggacggcaacggcctcctgcatcacttcgaaaacctccttttccttcgaaggctggaagcagatcgccatatcgcagtcgaaaaccacctcttccagacggtagtcgatctcctttttcaggttccttaaatttgccatatcattgtgcgttttaaaaatttgctccgacaaaggtacgaaaagctttcggattatcaaacgttttatgccctacgccgctgaaataatccccgccggcccatgcaaaaaaaaaggattccgcatgcggaatcctttttaccgtattattcggccttacatcttttccaactccctgtaactctttttggcggctttagcctcctgccgggccgccttgcgggctgctcgctcctgctcccggacgattttcttcgcttcgcggagctcctttttataatcgacatccgatccgggcatttcgacgatgatgcccgttatcgactcgtcgatcacctcgcatccgcagggttcgcagacgggctgcggcgcgggtttgggccggggaatcatcgtgcgctgctcgacgacgctgccttcgccgtaattgatcgtcagttcgacccggcggagcggcggaaggatattctttttcatatagttccatgccgaaggcatctttttgagcgccagctccttggcatcaggcgaccggctgccgtcgaggatatccagcacggactgtttgtcgggcacctccgacttggcgaccaatgagcggcacatctcccaatcttcggcgacggcattgaccgtcacgtcgtacttatttgaaaaaccatactttcgatcgacgtaattcttgaaatcctgcgctcggttccgggccagcgtctcgttgaatttcagcggaccgtcgggcgacgaatatcccgtgatctcgaccgatttgaccctcatcagcgtgtctttcatcaggttgccgacgaagtcgtccagatcgccgagctcccgcgaattgccgtcgagcgtcgaggagagtttcgccagattgatctggtagcggaccgagtagtcggtgtcgccgggacgtttgacgatgaacctgcggacgagataatcgccgtcggtggtctccgacagcatcacggtatcggccgcaggcaccggcgccgcgctcctgacttgggccgtcgctccggcagcggcacacaacgcaagagatagagcgaatgttgtaaagattgttttcacgcaaataatagtgttggttaattcctgccgcacaactcgcaagattcataccacggttgagcactaaatatttatggccgcagcggcaagcggaagggataataaaaaagaggaagatcgttgtactgcaccccaaaagttggacacttttggggtgttttttatgaaatataattatgagattcgtttaaaggccgtaaaactggtactcgaaggcggactttcggttagggaagccggatgtcacttgggctgtggccgctcgcaagttcacttgtgggtaacattattcgagcgccatggccttgccggccttaagctgcgccacggtagctacagtgcagaatttaagttgtcagttttgaagcatatgcaccaaaatcatctatctttgctggagacagcagtgcatttcggcattccgggcccttttgttattcgtcaatgggagcggctctatcaaaaccaaggtgctgaaggcctgcggcgtaaaccgcaaagaaggaggccggccatgagtaaatcgaagactaaaaaagtcaaactcaaaacgactccgcacgaagagttgcttaaggaactggagtatcttcgtgccgagaatgcttacttaaaaaaattgcaggccttagtcgaggagcgcattgtccgcgagagcgggaaagagcccaagccatcgaaggactaaggccgcagtgccggctttcagtattgctcaaagccgcagggatggcgcgaagcacattttattatcacttcagaaaatcaaaacaacccgataaatatgctcgcgaaaaagagagtattataaggttatatcacgaacataaggggcgttatggttatcggcgcattaccgttgaaatgaataagatcggatatgcgataaatcacaaaaccgtacttaagctgatgaatatttgcgggataaaaagtcaggtcaggctccgtaaatactgttcatacaaaggacagatcggacggatagcgcccaatcttctgcaacgcgactttgcagccgaaaaaccgaatcagaagtgggttactgaccttacggaattttcggtttgcggcgtaaagttatatctatcgccgattatggacttatataaccgggagattattagctataaaatagctgaacgccctaactttatgcagatcatgaagatgctggacgatgcgtttgccagaataccggattctccgggtattgtcttgcattccgaccagggctggcagtatcagatgaagcagtatcagctccgtttaagacagaaaggtattacacagagcatgtcgcgcaagggtaactgtctggataacgctgctatggaaagtttctttggattattgaagtccgaattattatatttgcaaaaattctcatccatagaccatttccgaaaagaattggaagaatatatcgactactacaataacaagcggataaagaaatacttaaacaacatgagcccggtacaataccgaactcatgccatctaaacaaatactaatccgtccaatatttggggtgcacttcatcgtcagccgagaagaaacgaggaaccgtcagccggagaaagcggacaaatcgtcagcagggaaaagcgggcggaacgtcggcaggagaaaagcgggcggagcatcagccggagaaaaggcggagcataaaaccaaacacccctcggcgggaacaggcggcgaaagcgaaaaaagccgcaggaaaaatcctgcggcttttctgcatttccggacagcgggcggaacgcccggcgatcagtaggtctgctcgatattccagacgaaggcccgcgagccctgcagtttggtggcggcgtccatttcacggaaggccgccatcagcggcgcgaccttttcgtcgtcgacgatcgccatgatcgaagcattcatcgacggccacgcatgcgtgccgtaatgcggttcgccgtcgacggagccgcggccctcggtcagcgcccagcgggtgaagccgcggatgccctgctcgtcgaggatggcgttcacacggtcggtaagcgcctgattataggataagaatactgctttcataatcgttttaccttaattaatgcacactcgcctgatgttcggccgacagacgggccagtttctccttctccttgcgctgggaacggttcacgaataccgaatagagcgcaggaatgataaacagcgtcagcagggtcgaacaggtcagaccgccgatcacggcgatacccatcggctgccacgtctccgagcctgcgcccgtaccgatcgccagcggcagcatgcccagaatagtcgtgaacgaggtcatcagcacgggacgcagacggctcttgccgccggcgatcacggcgtcgaagacgcccgaaccgcgctcgaccagcaggttcatgtagtccaccatcacgataccgttcttggtcacgatacccaccagcatgatggcgccgatcagggcgatgagcgacagtggcgtggaagtcatccacagcgcgaggaacacgcccgtgaaggcgaacggaatggtgaacatgatgatgaacgggaacagcagcgactcgaactgcgtggccatcacgatatagaccagaatgacgatcaggatgaacagcacgcccaaatcgccgaaagcgtcgccctgatcctcgaccgtgccgcccacttcgaggtccacgccgtcggggatgtggtattcggagatcagcttttcgacctcggccaccacgtcgcccagcgcgacgccggcgcccagcgtcgattgcaccgagatcacgcgctggcggttctcgcgctcgatcatcggagcggcatactcctcctgcacccggccgacctccttgagtttcacggggcggccatgcgcgttgtaaagcgtgatgttctccacgtcatcgaccgaggtgcggaatggctcgccgtagcgtacgacgatgtcgtattcgtcgccgtcctcgcggtacttcgacgccacgagaccgtcgatccggtttttcacggcctgcgacgcagtggcgctgttcatcccgtaatacgacaggcggtcgcggtcgaagaccacgttgtattcggggcgcaggtcgtcgcgcgaaagtttcacgtcgcgcacgcctttcatcccgcgcatcttctccttcaggtcgttggcgatggcgttcgtgacgtccatatcatagccgaaaaccttgacattgaccgtcgccgagccgctcatgctgcccgacatgccgcccggcgtcaccgtgtactgacgcacttcgggaatccggtcgaggtcttcgcgcagcaggtcggaaacgacgtagatcgaacgctcgcgcccctcgacatccgtcagacgcatgttgtagttgatgatatgcgagccggtggtctgcatcgcggcgaaggcgttgtccgaagagttggctccggccgaagccgacaccagcacgatctcaggatatttcgcatagatgatgctgtcgatctgccgggcgatgcgcgccgtatactccacgccgatattctgctccagctcgaccatcgccgagatacggctgttgtccgaaggcgggaagaactcggtcggcacgcgggtgatcagtcccagcgaaacgacgaaaaggcccatcatcgagaagatcgtgatgcggcggtggcggaccacccagttcaatgaacgggcgtagatgtcgtcgagccattcgagcgcacggtcgatcggcttgtagacgatgccgacgcctttgtagtcgtgtacgcctccgtcgagtttgaggaggtaggccgacatcatcggcgtgagcgagatggccgccgtcgtcgagacgcagaccacgatcgtcacgatccagcccagctcgcggaagaggataccggccatgcccggcaccatcgtcagcggcaggaacacggcgacgaccaccagcgtggtggcgatgaccgacagccacacctcgttggtggcgtagatggcggcctccttgggactcgatccccgctcgatatgggtcgtaatgttctccagcaccacgatggcgtcatcgacgaccataccgatggcgatcgagagcgacgagagcgaaatgatgttcagcgtcgatcccgtggcgaagaggtagatgaacgagcagatcagcgagacggggatcgtcatgcagatgataagcgtcgcccgccagcgtccgaggaagatcatcaccaccagcaccacgaagataaaggcgtacatgatggtctccgagagcgacccgatggcgtcggtgatctcctgcgagccttcgaaaatcagctccatcttcacgtccttgggcagcgtcttctggatttcgggcagacgcttctggatttcgtggacgatattcacggtattggcgcccgactgtttctggaacatcacgcgcacgccgcgctggccgttcacacgttcgtccatggtgaatttttcgagcgtgtcgcggatttcggccacgtcggagagcatcaccgtgcggcccccggcgttcgacaccacgaccttgcgcagctcgtcgctgagtttgaactcgccgtcggccttgatgttgaaggtgttgttgccgatgtcgatcgtgccgctcggaatattgacgttctcggcggcgatgatctggcccagctgctcgaccgtcaggttgtaggcgtcgagcttggcgggatcgacattgacctgcacctcgcgttcgggcgcaccgataacggagacggcacccacgccgtccacgcggttcagcacgttgaccagcttgtcgtcgagcagtttgctaagggccggatagctctcctcggccgtgacggcgatcatcatcacggggatcatcgaggtcgagaacttgaagatcgtcggatagtcgatgtcgtcgggcagcatggactgcacgcggctcaccacgtcgcggatctcgttggcaccctcattgaggtcggaaccgtactcgaactcgacggtgatcatcgacacgttgtcctgcgatttggaggtcagtttcttgaggttgctcaccgtattgaggttgtcctccagcacgcgggtgatgttggtctcgatctccgcggcgttggcgccggggtacatcgtgatgaccgaaatctgcggaatctcgatctcaggatactggtccacggccagattcatcagcgagaagagtccgaagaccatcacgccgacgaacagcagcaccgtggagaccggtttgcggaccgcactttcgtaaattttcatatgcgtcggggcgtttaattctgtttgacttcgaccttggcgccgtcgaaaagcttcgacaaagccgtcacggcaacccgctcgcccggagcgacgcccgaaaggatgtccacgcggtcgccgacctgacggcccacctcgacccggcggcgttcggcgacgctgtcacccttgatgacatagaggaaccgctcggcggtgcccacctgtttctggaccgccacgtcgggcaccatgacaccctctttctcgcccatgttgaatcccgtgcgggcgaacatgcccggacgcagcgtacgcttggcgttgggcaccttcacctcgaccttgaacgtgcgggtcgcgggatcgagcgccggatagatcagcgacacggtgccggggaaggtctcgccggggaagatatcgaccttcagatcgacgggcatgccgaccttcacgttgcggaaatactgctccgaaatgttggcgacgaccttcagcggatcgatctgcatgatatgcaggataggctgcgcggcgaacaggtcgcccgactcgtagttgcgggccgtgacgacgcccgtaatgggcgaatggacctcgatattcttcttgaggttggcgaccacttcgcgctgcacgtcgagctgggccttggcctgctcgatctgctgggccgagattccccccgcctcgtagaccggaagcaggcggttgtagtcgtcctcgacggtcttcagctgcacgagctgctgggtgtactgcgtggggtcgagcgtcacgatcagctgaccctgacgcacgggatcgcccacctcgaccagaatccggtcgatatgcacgcccgacgccgcgggcgtgatgtcgttctgcttgtaaggttcgatttcggaggtgaactcctcggcaagctgcaccggagctgagacggccgtctcggttttggtcagcacacgggtctcctgctggacgtcggcggtttttttgcccgtgcagccggcgagggctgcggcggcgatcaacataactgttaaattcttcataggttttatctgtttttcgattttatgctaattctccttgccgacgatgcggtcgtactcggccttggcggtcaggtagtcgaaaatcgcctgcgaaaagttcaactcagcctgcgtctgcgccagctgcgcgctgttcagttcgaggatcgttcccgcgcccgcacggtagcgggtgtcggagatgctgtaggccttgcgggcctgcgcgacggtcagctcctgcgcatacatcgtctcgcgcgcggtgagcaggtcgttcagggccgcgcggacctcgacgtcgatctgctgccgggcataatcccgctggagaccgatctgcgaaatctggttcttgatctcgcgcgacctgttcatcttcgtaaggcccgaaaaaatagggatcgaaacctgcaggccggccgacatcgggtgctgccaccagaatttggaaccgtcgagcacgtcgcccggctgtcctccctccgcaccgccgaaattgagcttcgtcatgtcgatatcgttaccagtataggtcgccgtaaagaatgcggtgaccgtgggcatgcgtccggcgttcgccactttgagctgacgtttgagcagatcctcctgcagttcgagcgtacgcaggtcggagttatcctgcacgtcggtcgtcaggccgtcggttcccgccagcaccgcgtcgcgcatggcgtccagctctccgacgacttcgatttcgacgttctcagggatcgaaaggtacattttgagcatcagcttggccaagcggatcgaattctcggtctgcaggatcgagggcttcaggttgctcagctgcacctgcgccgtaagcaggtcgtattccgacgcaagtccgttgtcgtactgcaatctggtgtcgtccacggtgcgctgcacggtggcctgagattcgcggagcacttcgagcgactgctcggccagcagaatgttatagaaggcctttttgacttcggcgaccagcgtaatccgcgacgagcgcgccgactccacggcggcagcccgctggacgtcgttcatcttcagcgtgcggaacaccgccggagcgaagagcgtccacgtggcgtcgccctgcgccgccagcgtattgtcggctccgaacgaaagccccttggtcatgctctgcttgacgatcgagcgggtataggtgccgccgaccgaaatctgaggtatccagctcccccacgtctgccgcttcacatagtcgaagcgctgcacctccatttcggcgaccttgacggtcgggttctcgctcagcgccagatcgagggcctcaccgagcgtgagacgcatttgtgccgcagcgccgaaaacgcccgtcgcagcaagacacacggttaaaatcagttttttcataaaatatcccaaattcaatttttatttgccgtacttggtcagttcgtatcttttcaggttgtcgtcgatcagccgcagccccttggccgtcgaaatgccgcggaagaaattgctgattatctgcacgaaggcttcgcgctcggtcattccggcgggcagcatcagctccttgcgggtcaccagcgcggaggccgtgtaataaagcaccgagatcgccagatcgatattgatgttatcgacgaacaggccgtcgacgataccctgatcgagcatgccgcgcaggctgcgccggttcttttccatgccttcgcgcgtcagtttgtcatggacggcaggatagaatttcttgagattgtccatcatgcggctggacacctcggccttgtccatcacctgcgccagcaccatgaacatggcttcgaggacgttgcgggcgttggcggtaagttcggtccaacgctgccggtcacgctggaagtagcgctccatcgccagatagagcagcccttccttgtcgccgaacagttcgtacagcgtacgcttcgatacgccgagatgctgtgcgatgtcgtccatacgcacggattttatgccctgcgtggcgaacatctgcatcgcttggtcgattatgcgttctttctggggaggggtcatgtcttcagtcgttttattcgagggcaaatatagcaacaaaacccacgaaaccaaaaaagttttctgttttttggagtttttaccgccgattatgccctgaacaagcagaaatgcagacaaacagaacaatcggagccggaaaccggggccgaaaagaaaacttattgaataataaaacaggggaaggaaagagattgcaagaggtggcttcggcgttacggattccggatcaggcagatgtttcgggcaggtcgaacggcacttcgaaaatcatgcggcagccggacgcatactccggatcgacgaacagacggccccccccagtttcacggcgataagccggcagataggcagtccgagtcccgtcccctgcgaaaagggatcgagtttcacgaaacgcccgaagacctcttcgcgcaggtcggcgggaatgcccggcccggtatcggtcacggagaagcgcagcagccgttctgcgggcaggcagtcgtaagtcagggtaatatgtccggagagcgtgaatttggcggcgttgcggagcagacgcagaagcacctgttcgatgcgtttgaggttggtccgcactacgggatcgtcaggcgtgagttcgcccagcaggctcacgccgggatgcagttccggcagggtgctctccacgcagtcgttgcagaggttgttcagcgccgtgacgtcgcagcgaggcaggtcgcccgtctggtcgaggtaggcgacttcgagcacgtcgtcgaaaagccgcagcagggtcgcactgttggcttcgatgatggaggcatactcgcccgtggcgggcttgtcgcggaattcggacgccagcacctgcgaaaatccgacgatcgaattgaggggcgtgcgcacctcgtgcgacatatgctggataaattcggtcttcatgcggctggcctgctcggcctgctccttggcttcgagaagctcttcgccgctgatccgcagatgctcgttctgggccagcaccgtcgcttcggaggccttgagacgccggttgagcttcatcatgcgcgcatatcccacgccgcccgtcaccagcactcccgccagcaggcagataatcagataggtgttgcgcaggcgtttgcgctggaggtcgtactgcagctccttggtttcgttgtgcaggcggctgatttcgagaattcccgaaaaatcgtccgtcgcagtgcggatttcgcggttgcgcaccgagtccgacagacggatgtattcccggtaattggccgcggcccgctccatctcacgcaggtgccagtagacgtcgccaagctccttggtcagcgcatagttgttgaacccggaactgcggatcaccgtgtcgcgctgcgtctccagaatcgtctccaacgccttcccgtactggcccgaagccttgaaataggccgttcgcagatagctcagcccggccgtatggaaccgcagcgaggggtcgcggcggaacagctcctccgaagcctccagccgtttcttcgcctccgcgaaattttcagtccggatatagtaaaggccgaagcccttattgacggtaaattcctgataggtggtccgcttgggcagcgacgcggccttctgcagcgcgacgaacgccgaatcgggcatatccagctccagcgcgcactgcgccagcgaagcgtactgcgtcggcaagttgatgtcgtcgatgccgttgtgttcgagcacctcgatctggcggcggaagttgtcgtaagccatccgctacgcgccctgcgtcaggtagaggttgccgagcatccggtagcaggaggcgacgccttcggggtaatcgtcgtcctcggcttcggcgagcatcttgcgggtctcgtaaatcgccgtgttggactggttctgcttgatataataggtaatcaggcggctcgaccagacgaaataatagaaatagcgcaggtcttccttgggatgcctgcggcagaattcctgcacgcgccgcacgccttcgaggatttccgcccggtcgttcttgtagtagaaatggtcgagacggacgcaaagcgcgatagcctgcatccttacgttgcgcgcggcttcggcccgccgaaagagcgtgtcgcacattgcaggggcttcggcatcggcgcggtgcgccttgcagagtttgtaatacgccgtcaaagcgctgtccgccggttgtgaaggagtctgcaaagcccgttcgcccgcccgcatcgggaaggcatgggagaaagccatgaggatgcagaccgcaaaagcggcgagagatgacggaatgcgcatgtataaagtgacgttaagcgctacaaagatagcattttcaaccggagaatcaacagaaaaagtccattttatcgaatttgcaaaaaaaccgccgcgtaaaattacgcggcggcaaactcggcggaacagcgttccggccatcgggcgttccgttcggagccgtaaaacagagccgtcctttccgacgtcccgtccggtcccgcgaaacgctcccgtcctgttatcgggtgacccgttcgagccagcgtaccatcgacagcatgacgagcatcgacaatccgcaggcggccacgaagacgaaccacgtagcccacatcggggtgtgcagatagagccatccgcccacgaacaacagtgcgttgcccacggccgtggcagccagccagaagccctgcatcagcccctgcatgtgcggcggcgcgaccttcgacacgaaggccagtccgagcggcgagatgaacagctcggcgaccgtcaggatgaagtagagtcccaccatcacccacggcgtaaccagaatcgactgcatttcgtcggccttcatgcctgcgagggcggccttgccgggcagcgccagcgagaagaacatcaggaagaggtaggccgtggcggcgatacccataccgatggcgatcttcatcggcgtcgagacctcaacgttgcgtttgcgcagccagccgaagaaccacatgatcagcggcgtgagggtcaccacgaagaacgggttgacgctctggaagatttcggcgcccttgatgaccgtgaagcccaagtcgatgttgatgacgtccagattcacgtagtcacgggcgaagtaggtcagcgaatagccgttctgatggaacgaaacccagaagaagatcaccacgccgaacacggcgaaaagcgcatagatgcgctgacggatctcctgcgccgacatcgtgatctcggcggcggaagccttcccgcccttggccgcagccttctgcgagggatcggggaaacgtttcttgttcgacatgtagatcatcagcgaaacgagcatcatcacgatagcggcgatgaaggcgtagtggaaaccgcggttgaaaacgtcgaggtagctgttgcagaaggcatgcaggtcgccgacgggcgacccgtcgaggtaagccgaattggcatacgaggtgaggttggcaagcccctcgccggccatgtcctgacctttggcaaggtattcgtggcagagttcgggcaacttggcgttgtagtcgaaattattgaccttgagccaccagttgcgcacgccgatggccacgaacggcgcgaagaagccgccgatgttgatgaacatgtagaagatctggaatcccgactcgcgcttggcgctgaactccttgttgtcgtacatctgccccaccaacgcttggagattgcccttgaaaaggccgttgccgaaggcgatgaccagcagtccgaggcaggtcagcgtcagatagagcggcaggctgggaaccggcgtgggcgtgggaatggcgatcagcaggtaacccagcgacatcaccaccagaccccacatgatggtgcccttgtagttcttggtcttgtcggcgatgataccgccgacaagcgccagcagatagatcgaagcgtagaatcccgaatagatgtaacccgccgtggcctcgtcgagaccgaacttggcggagatgaacagggtcaggatcgccatcatgatgtagaaaccgaatcgctcgcccatattggccaaagccgcggcgatcagtccttggggttgtcctttcataagttaatttttggtgttagtaataaatgattcgttttttgtttgctgacaaagatagaaaaattttccatatatttgtataaacacaaaaccggttatggaaaaaacgacccgcaggcttccgatcgtcgaacgcgacgagtggctgctccccgcagagcaggagctcaacaaccgtcacgagcggtatatggacaaaatgaacgcaatcgtgcaggcggcggggtcgctcgtcgattacgccaacggctaccgctatttcggctggcagcgcgacgagacgctcgacggctggtggctgcgcgaatggctgcccggagcgcacgacgtctacgtcttcggcgatttcaacaactggcagcggaccgaaatccgcatgcagcgcgaccgccacggcgtatggagcgccttcttccccacggcgatgtaccgtgacaggctggtgcacggctcgctctacaagctccacgtccatggcgacaacggctggctggaccgcattccggcctacgcgacgcgcgtggtgcaggacgaggcgaccaaaaactacacggcgcagttctgggcgccggagccgttcgactggcggggcgacgcattcgacatttcgaaaaacggaaacctcctcatctacgaggcacacgtgggcatggcgcaggagaaggagggcgtcgggacctaccgcgaattcacggagaagatattacctataataaaaaaggacggctacaacgccgtgcagctcatggccatcgccgagcacccctattacgggtcgttcggctatcatgtgtcgagtttcttcgccccggcatcgcgctgcggcacgcccgaagagctgaaggagctggtgcgccgcgcccacgagctggggctgggagtcatcatggacctcgtacacgcccactacgtgaagaacctcaacgaaggcatcaacgagctggacggcacggaccaccactattcgctgcccggaaaggcgggctaccagccctattgggactcgatgctcttcgactacggcaaggacgaggtgcagcatttcctgctttcgaacgtcaaatactggctcgacgaattccatttcgacggctaccgcttcgacggcgtgacctcgatgatctaccaccaccacggctacgtcgatttcgactgccgcgaacgtttcttcgacgcgggggtgaacggcgacgcgctgacctatctgacgctggccaaccggctggtgcacgacttccgcgcgggcgacgtgaccatcgccgaggacgtgtcgggcatgccggggatgtgcattcccgacacggacggaggcatcggcttcgactaccggctggggatggccattcccgatttctggatcaagcagctcaaggaggtgcccgacgaggagtggaacatctgggagatgtggaacgtgatgaccgaccgcctgcccgaagtgaagacggtggcctacgccgagtcgcacgatcaggcgctggtgggcgacaagacgctggcgttcaggctgatggacaaggagatgtatttcaacatggaccgcgcgtcgcagagcgtggtgatcgaccgcggtatggcgctgcacaagatgatccgcctgatgaccatttcgacgggcgggcaggcctacctcaacttcatgggcaacgagttcgggcatcccgaatggatcgacttcccgcgcgagggcaacggctggagctacgcccacgcccggcggcagtggtcgctggccgggaacgggttcctgcgctatgcatggctgggggatttcgacaaggcgatgatcaaactggtgaagcggtacaaggtgctggccgacggctacgcgtggaatctcgtgatggacgaatgcaacaagacgatggcctttgcccacggcgacctgctgttcgtcttcaactggcacccctcggcgtcgattcccgactacgagctgcccgtgcaggcgcccggcaaatacgtgcccctgctctcgaccgacgaacggcgtttcggcgggcaggagcggcaggcgatggacggcgagcacttctcgttcccggcgcaggacggggataacaccgagcggccgcatatccgcatctacaatacttcgcgcacggcgacggtatatctgagaaccgacggacgacaaccctccgccgtgaccgggaagtgaacggtccggagaaaggacgaggccgggatcaacagcacggagaggaagcaagaggccgggaggaaaccggaacggaacggcgatggaaaatcctattgcggtaaagggaaacgccgaaaaaacaaggctggaaagcaaaagcacggagaggaaacaaggccgcaaaagccggggaggaacggggctggaagaccgcaaaaaaacgataacgattaacggcagggaatatccctgccgttaatcgttaccgagcaacacgaatcggcggaagtcagcgcgccccgtcggcgggatagaccacgcccaactggcggcgcacttcatcgatgatctccagcgtcgcaagcgaattggcgtggctgttgaccgccgattccgggcggccctgttcgatcaaatcaatgaactccgcgatttcgtaatagtaacggtcccggtccggctccacaccgaccgattcgccgacagtctccgggccgcggcccgaagcggcgcctcggcgcggaaaacgggtcacacagcgtatgtcgtggatcgtatccagcagcagcgtaccctcctccccttcgatctcggagggcaggcgcgaatcggcgatcttggagtagagcaccgtggcgttcatcccctcgtaacggaagttgacggctccctgaccgtccgcccccgaagagagcacgacaccctgcgcatcgacggcctgcggccgcccgaaaagcgcgaccatcgggtaaaccgtatagacgccgatgtccatcatggcgccgttggaaagcgacggatcgaaggtgttgagcacgacgccctccctgaacttgtcatagcgcgaggagtactggcagtagctggcgaagtagcggcggatcgttcccagacggggaagctgctcgcgcacgatccggaaattgggattgagcgtcgcaatcatggcctccatcagcacgacgccgtatctgcgcgcggcttcgatcatcgcacgggcttcacgcgcattggaggccagcggcttctcgcacagcacgtgtttgccgcagctcatgcagaggatgctctgcgacgcatgcagggcgttgggcgaggcgatatagacggcatcgacgagcggactgcgggccatctcttcgagcgaggtgaacgtatgcggaatcccgtgcttcgcggcgaaagcgtcggccgtagcctgattgcgcgaacagatcgccgccgcctcgaagcgcgcatcctgccgggcgccggcaagcacccagtcggcgataaagcccgtgccgaccattccgaaacgaatctttcctttcataccaatgctgtcaatatattgttataaagtacgttcgtaaatccgggactccgcatcccacgggtgatagccctgtccgatatagcggaagccccacttttcgtacagcccggcgtgatcggtgctgaggtagagtttgccgaatccggcgcggcgggcgtcttcggccgcacggtcgagcagcagccgtccgtaggcgtgtccgcgcatatgttcggcgacatagagggcgcaggcccacgggcacaggtccatgcggctgataaagtcattggcgatcaaccctgcacaaccgaccggctcgccgcccgacatcagcagataccactgcggaagcggacctgcggcgctgacagcgtggcggatgcagtcctcataaagaacgggcggcacttcgggccagcaggccgaaatatagccgatcgcggcatccgcgaattcggggtgctccctgacggagacgattctcatggtcggacggttatttcgccgtgatgcgtttcacggcggcggcgacgtcggcatagagcgcaggcaggtccacgcccgccacgcggcggttttcgaccacgatgcggccgtcgaccatgaccgtatcgacatccgacgccttgccgcagtagacgatgttcgacaccagatcgtgaacgggctgcaaatggggtttctggaggtccacgacgatcaggtcggccaatgcgccctcgcggaccacgcccagttcgccttcggcgtagcccaaagcgcgggcgccgttgaccgtcgccagcttcagcgcttcgtaagccgggagcgcgacggggtcgcccgtggcggatttctgcaggaaggccgccgtgcgcacctcctcgaacatgtcgagatcgttgttggagcaggtgccgtcggtgccgatggtcaccagcgcacccgcggcgcgcagccgctcgacgggcgccacgccgctcgaaatcttcatgttgctctgcgggttgtgcgacacggccacgccgcgcgcggccagcgtcgcaatgtcggtgtcggtcaaatagatgcagtgtgcgccgatggtgcgggcgtcgagcatgcccagcgcgtcgaggtgttcgacgggcgtcatgccgtatttctcgcgcacgatgcgcacctcgtcctgcgtctcggcgatatgggtcatcaggtgcagtccgtaccgctcggccgtctctttgccgcgccgcaggttttcgggcgacacggtgtagggcgaatggggtgcgagggcgatccggatccggtcgcagccggcggcgagttccaccgcctgccccacttcgggaagcacctcttcgacgttgctgtcaaaatagttgcagcccagcatcgcgcggatgcccagccgctcggccacttcgacgcagcggttctcgtggtaatacatatccacgaacgaggtcacgccgcccagcagcatctcgacaatgccgagcgtcattcccaacgccacgtcgtcggccgtctggcgcgcttcgaacggccagatatagtcgtggagccactccatcaaggcgatatcgtcggcataactgcgctgcagcgtcatggcggcgtggcagtgggtattgacaagccccggcatcagcagccggcccgtgcagtcgatgatccgtgcgtcggggtgtgcggcgcggaatgcgtcggcttcggacgcggactccgtgaccagcgcgatgcggctgcccgcgacgcccacgaaacccgtaaaggttttgggactgccttcgtccgccgtcatcggcagaatcgtggcgttggaaaaaagaattgccataaatagcgtagttactttattgtagtgtatgtattattcggcccgcggatcgactccgacggtcgttgccgccgccaaaggcggcgtttgcaagtctgcccttccctgaatcccctcctcggagaagacttcccgcatgcgggcggattgcgggcggaaacttcagccgccccccgaaaccgtcaagcccccggaaacccgaaaccaccagtccccggaaaccccgccccgacccggaaaggcagtcctacttatctttcttatactttatcttcacctccccggtcttgaccttgcggggtcccggatcgatcgagttgccctgcacggtgattacgtcgcggccgtccaccgaattcgagtaaatctgaatcaccttgttgaagacgcccggttcgctcttgtggggttcgtagatgatgctgatggttccgctctcgcccggagcgaccggccgtttggagtacgacgccttgagacacgaacacgaggagatgacgcgcgtcacgaccagcggcaccgtgccgtcgttggtgaaggtgaattcgcgcaccagatcgccgcccttgcggggcacgtcgccgaaatcgtggctcgcgacctccatatgcagatgcgccccctcgatcttcgcgagctgctgggcgcggcccgccgcaaaggtcaggcatccgaaaagtgtcagtaataaaaatcgcattgtctttcgtttcaaaaattactccatacggaaaacataggtgatcgttccgccctgcaccgccgcgcggctttcggtaaagcgcgccttgcgcgccgcggctttggcggcttcgaccagttcggcggcgtcggtggtcgagcctttcggttcgtaggccgcactcgtgacccgtcccgaagcatcgaccgtcacgcggacgatcaccttgccgctcttcgaaccggggtacgaaggtttgggcaggtcgcccaccagcccgcgcccctgcaagccctgatccagctggtccagcccgtcgggattgagtcccggaccggtgccgctggccctgtcctcgccttcgggagcgcggggattgcccgcgttgtcgggttcgtcggcgccgcccttgttcatgttgaacagcgcgcggggattgggcgtctgcgtcgtctcgtccttgccggagacctgcgccgtctgctcgacgggagccgtgcggtcgtgcacgcgcggctcggtggccgtcctgacgcgcggcttgggcggttcgagcgcaggcggctcggtgaagtcgatcgtgatcgtatcgcccggcttgtcgtggatctgccggaagtcgaacgagaccagcgcgaacgaaccgatcagcagcagcgcgtagaccgccgtcgcaaccgtcgcccacctgcggggattcctgttatttggatcgtaataatacataaaacctgattttggcgacggctgccgccgccggacggcgtccgtcaattcggcgccgtcgccagaattaacttgtaattgttgtccttggcgatattcatcaccttgaccgtctcgcccacggctaccgtctcgtcgcagtgcagcgacacggtggcgtccttctgtccgtcgagacgcgtcttgagcgcacgctccacgccctcgatcgagccgacctcctgcagttcgacgtaatagcggtacttgccgtggcccgcatcctgtatcgaaaccgtggtcatcgccttgtccttgagctggttggagcttttcggcagcatcagcttcagggcgttgggattgatcagcgtcgtagcgatcagcagaaacagcagcagcaggaacatcaggtcggtcatcgacgatgccgagaaggacttatcgaccttcgatccgtgtttaattgccatagcgcgttatttttgaacgggttgattcagaatgtccatgaatgcgatcgagttggcctccatctggaaaaccagcttctcgatgcgcgcgacgaggtagttgtagccgaagtaggccgggatgccgacgataagacccatcacggtggtcaccatcgccacatacataccgctcgaaagcagtcccagatccaccgtgccgcctgcggccgacatgtccatgaaggtctgcaccataccgagcaccgtacccagaaaaccgatcatcggggcgccgccggcgatcgtcgccagaaacggcaggccgttttcgagcttcgagacttcgaggttggcgacgttctcgatggccgtctgcacgtcgctcatcgggcgtccgatgcgctcgatgcccttctcgatcatgcgggcgatcggcgtgtcggtcttcttgcacagattcacggccgtctggatcttgccgtcggaaatgtagtcgcggatgcggttcatgaagttcatgtccagcaccgaagccttgcggatagccatgaaacgctccacgaagataaagatcgtcaccccgcccagcgccagcagcggccacatcagccaaccgcctttggtaaacagcgtccacagtcccatacgggtctcctcactggtggccaccgcctcggcagcctgcaaaaaagtcatcatagtgttttagaaattatagaagtttgtcattgaattttttctgtttccggttccggccgatccgtttcacggcgcgggcgcatccttttcatgtttaacgtatcggaacgcctgcagcgtatccgccgccgcacgccgaagctccttttcccggcgggcggcctcgcggcgcgcttcgcgccgggccttgcgcttcttgttggtgaaacgctcccggatgcgccgccgcaggtcgcggaagttgtcgaaatcctccttgaagtagatgccgacgccggtctcctgaagaccctgattctcgtcgaagcggtcgatggtctgcgtaaaggccttggccttgagcgttcccgcccggtcgatcaggtaggtgatgtaggcttcgcccatgaagttggacatcgagctgttgatggcctgtttgttgtcgatcaggtagttgccctcgacctcgacgaacagacggttgtttatcaggctcttcgaaaggccgaaatccacttcgtcgctggtcagctccgacttggggcggtagcggatgacaatgttgtagtcgtcgttcgaaagcaggttgctgaccatgttcgagaggaactccagccctgtcgcggccgaaaccgacgcaccgatgttcgacgaggcggcgttgttctcggacatgaagctgttgaacagcagcaggtaggcgaactgcgtatcgaccgtctcaggggtggtcagcgcattggcgaccacggcctgcgtctcagggtcggtgccgggcacgttcacgtcgaaggtgatggccgggttcgaaagccggtcgccgaggtggatgatgcactcgacgggcaccgagcggtcggccgtcacgttttcggccgtgccctgcagcagcggctgcagcgaggctttcaacttatagatggcgtcgatattgagcatggcgtccatcggcgcaccggtccactggatcgtcgagccgttttcgataatgaacttcttgttgatgatgttctggagcgagaaaaggaagcttccctcggtgatggtatagtcgccgtacatttcgaagacgttcgagcggggattgatctgcaggttgagcgttccgtcgccgcggcccttgagcgtattgcccgacacgctcagctcgacctcgacgccgggccgtacgttgagcgccagcgcaatgttcatctggctgccggccaccgtcttctgctgccgccggcgttcgaacatcatcttccgccgcgccagattgtccaccgtatcgaccttgggcttctccttgaaggtcacgaaatcggcgtacgagatattggacttgttcgacagcggcatgaagaacgacgaatggtcgtcggtggaggcggcgatgtccatattgactgcgcccttgtcgcccgaaatgctcgccgtgcccgaagcgtagaccttgccgtagaagaaatcgttgtcctgcgccgtggtgttgagcaccagcatctgctggggtgcgacacgcacgtcataggcgatattggagaggtgctgcagactcaggtcgatgtcgaaacggccccggttgccttcggggtcgaagaccggaacgttcgacgcgcggaagcggttgccccgcacgtcgagaacggcttcgggcatcgaataggccacctgtgtaaaatcgactttcgtcgagagtcccgtgacgtgaatccgtcccgtcaggtcggcatcccggcgctggccctgcagcaccagttcggccgaagcgagcccctcggtctgggaaatcacgcccgaaagcatcgggtcgagcagccccatgtcgagactgtcgatgtccagccgggcgtagtagcgcacctgcgaaggggcgtagaagccccggataagcgtatcgcgcttgttacggtcggtgacggtcaccccggcgcggttgcgcgagaaatcccagcgcgaagagagccgcagcggaggagccggaatgtcgttgacctccagactgtcgagcaggatgtcggcggagatttcgcccgcatggagcacggatttcatcgtcgcggaaccgttggtgcgcccctcgacgacgtaccccaagccctcggcgacctgcatgaaaggtgcgaggtcgaagttgcgcaggcgcagcgtcaccgaatcctcgcggctgcgcgaggcgacgccgtccagcagcagctcctgctcgcggttcatcacgaaaaaccggtcgatcacgacctgcgccgtgtcgagctgtatcttgcgggcgtaaatctgccacgtcttcgaaccgcgggtgacgtgcgaaggcaggatgcgcaggtccacgacgcggccgttggggccgtgttcgtccaccacgtgcgcctgcacgcccagcagtcccgacaccttgcgcagcgtatcgttgaaacccgccgaaacctgcatgcggccctgcttggcgccgcccgtgagcgacagttgcggcaggtgcagcaccccggcgtagagatcctcggccgaagcgtagaccgtgagcgagtcgccccggttggaggcgttgatgctcaggcgtgtggccagcatgcgtttgcgctcgacgtattccgacgtcgccttgagcgaaagctggtcgctggccggattgaaaagcagctgcatcgacgacccgtcggcgatctgcaggccggccgtgatggcgtcggtgatggggtctatgtgacggatattgaccgacagcagcgaatagtcgttggccacggccgtcttgcggccgcggggcgtcgggtcgccctcgccgcggcgcagcaggggcaggtatttccatgcgctgcggcgcaggtattcgaagacttcgcggtagctggtcttgctgcggaacgtggcgtcggcgaagtccgagcgcagttcgacgagtttgctccgcgccgagttctcgcccgtgacggtcatggtcttcgaggtaatccgcttgtcgttgtagcggtatacggcgtcggtgacgtggatacggccgttcaggtcgtccagcgagcgtcccccggcattggcctcgatacgcgccgcgagctgcgagacggagtcgcggcggttgatatggagccgggcgaggtcggcatggcgcaggtccatcgtgaagtcgtagcgcggaatcgagtcgttgaaatccaccagccccgaaaaatcgaaatcgaggttgggatcgcgggccgtgatgcggccgtcgaactggcggttgcgcaggcggccgtcgagccgcagcgagtcgtagatatagtcgttgaagcccagctgcgtgacgttgcccacgacgttggcgtcggtatagcctttgccgaccactccgtcgatataggccgagagggtcgcgttgcccagcaggtcgcggcggccgagcagctcgcccagacgcaggttgtgcgtctccacgtcgccccgcacgctgctgcgccccgccttgagcggcgtcatccgcaggttgcaggtcacctcgcccacgccggtcgaggcgccgagctgcatgtcgaacgacgaaagcagccccttgaagcgggcgttgacgtcgatctgccccgtgttgcccagtatgccgaccagcttgtcggacaactcgcggccgccgatccccgcagccagttcgtcgacggcttcggcggaggatttgagccgcggaacgttcaggtcgaaacgggtctgccggatgtcgggaagcccccggaccgaagcgtcggcgatgagccacgtaccctcgccgatctgcatgcttttgaccttggccgtgaaatcggcgaccacacccgcgacctcgacattgacgttgctgaaatcggtatgccagccgcgcaacttgggggcgaagtaggcgatgtcgtccgtcgagacggtcgtattgcgcagcgcgccgtcgatgcgcacctcgccgatgaagtccttgtactcggcccacgaatcgcccgccagcgagatatagggaatctggacgttcgaacggcccgtcacgaccgagacgtcctcgaaacccatgcagccgttggtcaggtagaaccgcccggcgaagcggtcgagggcgaagccgctgcgctcgcgcgccgagagggtttcgatggtggtgtagatggactgcccgtcgatggtgaagtcgttcacatatgccgtgatgccgtagaggtgcatatggctgaagtcgatgccgaactccgggtcgcggcggtcgagccgctccagacagaggtccatattctcgatcgacgccttgcgcagcgacaggcggaagttgcctttcttgggtttgtcggggttgctgatacgattgacgatctgcttgatgttcatctccccgccgggcgtctcgcgcaggtagagcttggcgtcggcgatctcgccgcggctcagtgcaagtcccccgccgaagatgcccagtccggtgacaaaggcgtcgagacggcccacgtagagcagcgtgtcgcgctggtaatcctcgacatagaaacccttgatcttgaccctgctgaaaagcccgatgtccacgcggtcgatgctgacggtggtttcgagcttcttcgacgccatgcgcacggctttctgcaccacgtagttctgcacggccggaatgtcgagcagcaacgagagcgccagaggcagaattatcagcaacaataccgcggccgataacacctttcccaatatttttatacctttgcgcattgataggtcgttataacctgcaaatttaactataattagttaaaaaaacgaaaaaccgcatggatattactattctgggcatcgaatcctcgtgcgacgacacatccgccgccgtgatacgcaacaacgtgctgctgtcgaacgtcatcgcctcgcaggccgtccacatcaaatacggcggcgtgatccccgaactggcttcgcgggcgcaccagcagaacatcattcccgtggtggacacggcgctcaaggaggccggactgacgcccgaagagatcgacgccatcgccttcacgcgcggccccggactgctgggttcgctgctggtgggcgtgtcgttcgccaaggggctttccatcgcgcacaacatcccgatggtcgaggtcaatcaccttcagggacacatactttcgcatttcatcgaccttcaggaccgcgcgctgccgcaccccggattcccgttcctctgcctgctcgtgagcggcggccacacgcagatcgtgcgcgtggattctcccctcgaaatggagatcatcggcacgacgatcgacgacgccgcgggcgaagccttcgacaagtgtgccaaagtgatgggactgccctaccccggcggcccggtaatcgacaaactggccaaggagggcgatccgaaggcgttccggttcgcacggccccacgtagacggatacgactactcgttttcggggctcaaaacctcgttcctctacacgctgcgcgacgccgtggccaacgatcccggtttcatcgagaacaacaaggcttcgctctgcgcttcgctgcagaagacgatcgtcgaaatcctgctggacaagctggtgcgggcgtccaaggacctcggcatccgcgacatcgccatcgcgggcggcgtttcggccaactcaggactgcgcaacgggatcgtcgaagagggccgcaggcgcggctggcgcacgttcctgcccgaattcaagttcacgacggacaacgcggcgatgatcgccatggcgggttactaccgctaccagcacggcgacttctcgtcgctcggcgtctcgcccgtggcgcggctgcaggagctgtaggagccggacgcggaaacggcagaaaccggacgccgaagccgcatgagccggatgcagccggccacaaaaaagctcccggccgaacggccgggagcaggtccggaagacgcggaaaagcactccgcgcttccacaaaagcgatctatttagaatgcaaggatcggacgggcgataccgtcgtaatcgatatactcgcacataagctccaccagatgtttctcggaaccgccgatatgaatgatacatgccgtctcgccgggttcaaagcaggtcgtagcccacagcgtacaggtattgtaatgggtgccgtccgtcacgaacagctcctccttctgatcggcgggaatcatcgcaagcgtctcgttgaatttcgcaatcacgtcatagcttacattttcggagttgtaaccgtaatagacattataactcgaagtctgccactctttcagaagcagagcagcttcatggccgcagagattggccaccatatcccataactgcccggtgctcggcaggaaccagccgctcgacgtttcgggagccgggagcgagaaattattaaccgtcaaatcgaaagcagggcaccatgtagcaaggttcggtccataatcggatacggttttcatcgtctcttcgtaaccattgacattgccataccacgtgcttgcaattttcgctttcggagtgcttgcgaaatcattgtcggtagaatactgaaccgtctggctgtcggcgctatgggcatttttcacagccacgacatacccgtgcgtatagcccttctccttgtcgccggcggcgatccggttttcgtccgtctggcagacgatgccgataacggtcttaccggcgacgggagcgggtttggtgtcggcccagacgggattcagtccgtcggcctcgatgcttaccagtccgccgtcgctccacgtaccgtcggaatagtaatagtcgccgatcttcggcgcaacgtaagccaccgtcaccgtgcaggtcgccttgctctcgcccacgctggcggtaatagtggcctcaccggcggcaagagcggtgacgacaccgtcctcgaccgtcgcaactacctcgtcgtcagaagaccaaactaccgctacgccgtcctgcaggggggggtaacggtcgctacgagcgtttcggaaaacccgacattgagattcaattccgtccggtcgagcgtcacgaccgtttcggggaccttcttctcatcgtcgtcgcaggcgaaaaacaccagcgatgcagccgtcagcaaagctgacttccttaaaaagtttctcataaaccaagttttaagaattaataatacggcagtaccgacagcagtctctccggactcacgacaaaaagcccagtaatgttttcgatgatcgtccggcaaaacaccatcaataacctaaccgggagtcaaatataataaaaaatcaacccggtggaacgcggatgccggaaaaaattcacggtcaaataaaaagcccctaataaattaggggctgaaaaggcaggcgtccggaaacgcctgccgaaatattatcccggcaaaccgggagggggcttatcttgcgccgaagagtttttccttcagcgaaaagttatcgtactcgtctctgagcgcggccatcaggtcgcgcaccgactgaatcttctcggcgcgccatgcgttggcgccgcagaaggcgtagccgttctgcagcttgcctttgaatgcgttgtagagcgccagcatgatgcagtagggactgtgcgtcacgtcgcaggtcttgatgcagtcgaacggacagttcttggggcgtttaagcccctctttcaccctatcgaggaacgagctgtggatagcccgtcccggcatgccgacgggacttttgatgatctcgatgtcctgcggtttggcgtcgagataggtctgcttgaaggccggatcggcgtcgcactcctcggtggtcacgaagcgcgtgcccatctgcacgccgtcggcgcccagctgcatgatacggtagatatcctcgccggtgtagatgccgccgcccgcgatgacgggaatatggcagtcgtgttcggcaccgaaagcgcgcacctcggcgacgatttcgggaacgagggcttcgagcgaaaaatgctcgtcggcgagctgctcctccttgtatccgaggtgaccgcccgccttggggccttcgacgacgatggcgtcgggaatgtacctgtactccgagaaccacttctgacacaacagtttcgccgcacgcgccgacgacacgatcggggccagcttggtcttggcgccctccgtgaggaacgacggcaggttgagcggcaggccggcgcccgaaaagatgatgtcggccttctcggcgacggcggtcttcaccatgtcggcgaagttcgacatggcgaccataacgtttacgccgacgatgccccgcgtggcttcgcgggccttgcgaagctcctccttaagcccccagatcgaggctgcgcggtagtctttcgaatagttgttgtagatggctccgagacctgccgacgaaatgacgccgacgccgccctgattggcaacggccgaagccagtccggagagggatatgcctacgcccatgccgccctgcacgatggggacggtggcgagcaaatttccgattttcaatgctttcatgttaaattgggattagtgcgaactaaataaccatggggccaaaggtacgaaaaatcggggcgattggttccgcacgggaagataatttaacgcaggcttcacattgcgtcgccgcagcggccgccttttcggggcgggaagccgcagccggccggctgtccggaagtgaaaagcggcattttttacaggcaaaaaaaacggcggatatcgcttttttttctaacttggaagcgcaaacgtcactcaaccgctaaccttaaatcgacaagcatgaaaaaacttctctttccggttctggcccttatgctgtgcattccgcccctctccgcccaaaacaagggagacaaatatgtcggcggaataatcggcataacgacgacgtcgatcagcatcgacggctcctccgcatcgcagacgacattcggatttgcacccgaattcggttatttcgcatccgaccgactgcgcgtcggcggctcgatcggctaccaactgatttcatccgacggcgaaacgacgcacgggctgacggcaggtcccagtctcgcctattacgtcagactgtgcgaccgcttctactacacgccgcagctggccgtgggattcgcgttcgcatcgacggacgggaccagcggatacggcttcgatgcaggattgtcgctcggagcgttcgaaatcaggccgtcggcccatatcggactctcagtcagccttctgacgttgggctacagctacctgtcatattcgggaacaggtgtgaacggggtctctttccagctcggaatcagcccgacggtcggtttcaaatattatttttaggccgcaaaaacccgatcccgccctacagaaaccgcacgccccgcacgcggctccggctgcggtcggcggcttcgcgttcgacgatgcccgtcaccacgtcggcggcatcgtgccagcggttggcgcggaaacggcggcggtaggtggtcaggtgggcgtagagttcgggccagcggaaattccagccccgcggccaccgcaggaggtgaagcgcagtggccgaattggagaggatgcgggcctccttgttgcctccctgatgaaaccattcgatgcgcacgccgggcgccagtgactgcacggcgcgggcgaagccgcggccgccgttgttgctctcgacggccgcctgccgcgtgtcggagcgcagcagcatctcggcgaccagcggttcggagacctccatcggttcgcgcgtatatacggcgtcggtgatgtagatagccccgtcggcatcgaccgcataggagagtgaacagaggtagtcgtcgcccgtatcggccgtatcggtatagttgccgcggcggacgatctcgtgcggcagatcgtcgtactcggcgaaattcagcccgtataaaagtccctcgcgcgaggagggatgcccctgatacatgctttcgaactgcagcggatcgagccgccgcttggcttcgagcagggcgcggccctgctgctgctcccacaacgcctcgcccggcatgcgcgggtcgattccggtcggcggcgaggatttgagcgcttcgaagttcaggtgcagccacgtatcggcaggcaggccgtcgagctgcgcccactccttcagctccgcgaccggctcgcgggccgtgagcgtgccgatcaggtcctcttcgtgccagcgggtgaagacgatcagctcgcgcgaagcgttgtgcatgcgggtgcggaccaccgacgtataccactcccagcagttggcgcggatgagcggcgagttggcttcgagggcgtccttgtagaggtcgtcgaggataaaacaatcgacgcggttgcccgtgagcgaaccttcgcgccccaccgaaagcaggccgccccggcagccgatgatctcgacctcgtcggccgtgcggatatagctgggcggcttggaaccctgcttgatggtcgtagcggggaagaacgcggcgtattcgcgcgactcgatgatacgctggacacggcggttgaatttcgacgccagcgctcccgaataggaggcgatcgccacgcgctgatcggggtccagccccagcacataggccggaagcagggtcgtggcgccgacgcttttgccgtgctggggcggcatggtgacgatcagccgccggacgcggcccgcggcgaaagcttcgagcacgcggtaataggcccggtggaaaggctgcaactccagaaagggatagactccgagggcgaaccgctcgaacgaaggaaggtccgccgggccggaaactgccgaggtgacaccggaaagcgaggaaaaggaggcagaagcagagcgagcagaatcggaaggagcgaaatccgacggcacagaatcgggaagcacggaatcagacggggtggaaccggacgaagtagaaccggagccgcaaccacgtgagtcgcaagcaccggaagtcaaaacatcggagccggggagcagatcaccggcgagagattcaccggggagagattcgccggaaagtgattcgccggaaagtgattcgccggaaagtgattcgccggaaagtgattcgccggaaaacgaatcgcggagcaaaaattcgccggcgagagaattcgcaggataatccggcgcgagaatgccggccggaacaaaaacctctgcggaatcggcttccgcagaggacaatttggatttcaagaccatttgtagaaattttgaacccatgcgcggcgccgcggcgggaggttcggagagaaaaagagcgttccggcgggctgcgccgcaccaaggaaggataaatgccggaacgaacaaggcggggagccggagggcgcacggcctgcggccggggagcggcccgatgcaaaacggggaccgggcggttgcgcacgccggcggcagaacatgccccggcagcgatcagacgaagcgcttcatctcggaaaaatcgaagtcgttcagcatttcgccctccgccgagaaggtgtgaaactcccaccatacgggcacgaggtccgaaacaggctccgcatcgccttcgggctgcgagagccgcgtccggtagacgatgaccgacgccgtaaagcggcagtccgtatcgccgaaacggaatgcgagcgatcccgaaaagtagttttccccgtcgacagcatccgccaaacgcgccgccacctcttgataaagttcaggtgaaaccgaatacatagttgataattagcaggatttttgcaaaataatttgcatgtataaataaattgtttaactttacagcacaaatatagattcaaaatttgaatttccaatcgaaaaatacaattttttgatataaaattttccgattaaaagctatgaacacgcgggtaaaattgatacgaaaacagctgggcatgacgcaagaacaattggctcagcatcttggcatcggcaaagcggccctttcgatgatcgaaacggggaaagccggactctcggcccggaaccgcaacatattggttcaggaattgaacgtaagccccgaatggctggagagcggcaaaggcaacatgttcaacgccgaacccgacctgacggcctacagactccgcacggacaattcgctgccgctgcagagcgtgccgctctactcgatcgagggaacggcgggactggtgccgctgttcacggatcaggcgcaggccaaacccgtgaacttcatccacattcccaatctgccgaaatgcgacggcgcgatatatatagtgggcgactcgatgtatccgctgctcaaaagcggcgacattgtgctgtacaagcagctgggcaacatcgacgacatattctggggcgacatgtacctgctgtcgatcgacatcgacggcgaagagtacgtcacggtgaaatacatccagaaatccgaccgcgagggttacgtcaaactcgtgagccagaacccgcaccacgcagacaaggaggtggcgctcagccgcatccgcgcgatcgcgctggtcaaggcgagcatccggatgaattcgatccgatagcggcggcccgccggccggcaccgagggcccgcaaaaaattcacgccgtaaaaatccgaggggagaggcattcgtgtgggtggggccgggaaaggatcgggcaggaatcagagaagaatcgaggcagatccgggagaaaccgggacgggatccgaaaaggccggaaacgaaaattcggaacgggaacgatgaggaaatgcggaagcaccgcaaaaaaggcagcgaaacggcggctggaaaacaggacaaaacagagcagaacaaacagagcaacacaagccgaaaagaccggaacggtccggccgaagcaacaatctgaggaaaaaattcgtatcttgccggaaacaaagacgacccaatacggaactctccgataaaaaattcgcggtgctgatcgatgcggacaatatctcaccacaccggaaaatcaaagacatcctcgacgaaacagccaattacggaacaccgacgatcaagcggatctacggcgacttcaccgatccgaaattcgcggcatgaaaaagcattctgccggaaaactcgatcaccccgattcagcagtatgcctacaccacaggcaagaacgcaacggattcggcgctgataatcgacgcaatggacatcctgcacaaggagtcggtcaacggcttctgcatcgtatcgagtgacagcgactatacccgtctggcgagccgcatccgcgaatcgggccgcgaggtgctgggcttcggcgaaaagaaaacgcccaaaccgttcatcaaatcgtgcgacaaattcatctacgtcgagattctcggacagcctgccgctccgacgccggcacttgcgcctgcaccgggtcccgctccggctgcgacacaggccccggcagcgaaagccgcacaaaaaaagacatccgccaaaaggcgtcagacgtctgacacgcaggtccccggaacgccggaagccgccgcaggcaaaaaaaccgctccgactccgggacagactccgggtgtggttcccgcttcggagcagcctcaggttacggttcaggctcagactctggaccctgcgcagtcccaatcgatcatccgtccgatagacgacgatttcaaagacctgctcgccaataccatagaagacgccgccgccgacagcggctgggcattcctcggcatcgtcggcagtgtcctgaccaagaaaatgcccgatttcgccccccgcaactacggttacaaaaaactttcgctgctggtgaaagccctctccgaggcaatcgaaaccgaagaacgactgtccgcaaacaaagagcagaagttcatttacgtccggaacagaacaaggtaaacgctccggtcgccgaccatccgtccggcggaaggatactcctcaaccccagccgcacaattacgcggcaaaaagaacttgcgggattttccgccggccggaaccgttccgcccctgccatgaccataatacgcaaaccgccgggcaaaacagcccggcggtctgagtatcgaaacaaatcaacagtccaacgcgacagcaagcgccttcgcatgattcatacggatcacgccttcccgttcttcgacactggacggcggcattccaaaaaaattaaaaaactccccgctttcggattcgcgcagaaacgggcgttttccgaacgaaacaaaagccggaatccgccgaatccgcacatattatcaccgaaaaaccgaaactccccgcaaaaaagccgcaggaaaaccccgaaaaaagtcgtctccggggaacaaactgacaataaatttatatatttgcaatattgtttttctaaaccctactaatccgaaacaagacatggagaaaaccaatgtacgggagttgcaggatgtcgtgattcgcttctcaggagactcaggagacggcatgcaactcacgggtacgctcttttcagacacttcggccctgctcggaaacggcatctcgacctttccggactaccccgccgaaattcgtgcgccgcagggaaccgtggccggcgtatcgggatttcaggtacacttcggcagtcaccgcgaactcaaccccggcgactactgcgacgtgctcgtagccatgaaccccgcagcgctcaaagccaaccgcaaatggctcaagcagggcgcgacggtgatcatcgacggcgattcgatcaccgaagagcatctcaagaaagcgggattcgccacgctcgacccgatcgcggagctcggactggacgaatacaacgtcgtcatccccgacatcacgtcgatgacgcgcgaagcgctcaagcagaccggactggacaacaaggccgtggtcaagtgcaagaacatgttcgcgctgggcatctgcttctacctcttcgaccgtcccgaagcgtacgcatacaaatatctggagaccaaattcgcacggaaaaatccggtcgtggcagaagccaacaagctggctatcgacgcgggctataactatgcggccaacacccatcagttcgccaatacctacaccgtgtccccggcgccgctcgaaaagggcacctaccgcaccatcaacggcaacgtggcgacggcatggggcctgtgcgccgccgccgagaaagccgggctgccgctcttctgcggttcgtatccgatcactccggcgacggtcatcctcgaagagctcgccaagcgcaaggacctcggcgtgaagaccgtgcaggccgaagacgagatcgcgggcatctgcaccgccatcggcgcggcattcgccggcaatttcgcggtgacgaccacgtcgggtcccggactctcgctcaagagcgaagcgctgggactggccgtgatgaccgagctgccgctggtggtcgtggacgtacagcgcggaggcccctcgacgggtctgccgaccaaaaccgagcagagcgacctctcgcaggccctttacggccgcaacggagagtgcccggtgatcgtcgtggcggcatcgtcgcccagcgactgtttccactatgcgttcgaggccggacggctggcgatggagcacatgacgcccgtgatcctgctcaccgacggcttcatcgccaacggctcggagccgtggcgcattccctcgatgaaggactacccggcaatccagccgccgatcgtagacgacgcgcccgaaggcggattcatgccctacgtgcgcgacgaaaagctggcccgcggctgggcgttccccggcaaggtgggactggagcaccgcgtgggcggtctggaaaaagactgcgtgaaaggctgcatctcgcacgacccgtccaaccaccagaagatggtctcgacgcgcgcagcaaaggtggccaaggccgcggacgacattcccgcacaaaccgtatggggcgacccggaaggcgacctgctcgtcgtgggatggggcggaacgcgcggacacctgcagaacgccgtcgatcagatgcgcgccgaaggcaaacgcgtgtcgctcgcacatttcaactacatcaacccgctgccgcacggcgtgcgcgacatcttcgcgaagttccgccggatcgtcgtctgcgagctgaacgaaggtcagttcgccaactacctgcgccaaaacctgcaggagttccgctacgaacagtacaacaagtgcgagggcctgcccttcacggtcgtagaactgaaagaaaaattcgaatccttattgaagtaacgccatggcagaatacaaatacaccccagcggatttcaaaagcgatcaggaggtacgctggtgccccggatgcggtgaccacgccatcctcaacgccgtgcagcgcgcgctgcccgaaatagccgacgccacagacacgccgcacaacatgttcacgttcgtgtcgggcatcggatgctcgtcgcgcttcatctactacatgaaaacctacgggttccactccgtacacggccgcgcaaacgccgtggcgacgggcgtcaaggtcgccaacccgcggctcaacgtctgggtcaccaccggcgacggcgactcgctggccatcggcggcaaccacttcatccacgccatccgccgcaacgtggacctcaacgtcattctgttcaacaacgagatttacggtctgaccaaaggccagtactcccccacttcgaagctgggcaagatcaccaagacctcgccttacggcacggtcgagaagccgttcaaccccggcgaactggtgatcggcgccaagggcacgttcttcgcccggtcggtggacatggaggtgggactttcgaaggagtgcatggtggccgccgcgatgcacaaaggcatgtcggtagtcgaagtactgcaaaactgcgtgatattcaacgacaagacccacggcgagttcgccgccgacaaggctacgcgtgcggagcgcaccgtaacgctgcgccacggcgagaagatgctgttcggagccgacaagcagaaaggcatcgtcttcgagaacatgaagctgaaggtcgtaaccgtcggtgaggacggctacacgctggacgacgtgctgacgcacgacgcccaccagcgcgacacgacgctccactcgatgctggcggcgatgaagtaccccgactaccccgtcgccttgggagtaatccgggccgtcgaggacgccacggtctacgaccgcgaggtcgcccggcaggtcgaggaggtcaaagcccagagcaaaatccactcggtggacgagttgctgcattcgggcgcgacttgggagatcgagtaacggaagagtgcgcggacggaagaccgaaccacggaaaatagcgagacggcaaactgcgcagacggcaggccggatcacggaaaatagcgagacggcaaactgcgcagacggcaggccggaccacgtgtgggacgcagcagaaagtgcgtccgcaggccctcccccgaaggacagagcgacacccggcaggatgctgatgctgaggggagcctgttccggaagggcgtcaatcccgtaaggatgctgtccctgaaaattcgttacagttcaataagaaacagccggaaattccggctgtttcttatttcagagcatatctcccgtttccggcaatcaaagcgccgcatacgctggttccgacagcaggcatatgggtgaaagggcttcgagaagcgttcgcaagaacaggtcccgcgtccgaacggcatccatcgcaacaaggcggaggttttatgcaaagcgggcgcagcctgctgctgcccccccctccgcaaagtcataaaaggcaagaagcatgtcttcataccgtgtgtccttgcggccgtggaccgattcagtgttcgagaagcgtggtgtcgatgatccggcgcatttgggcgatctccatggctccgttggcgtgcttcggttcaccggacacgggaataaacaggaacgtcggaatgctccgcacgcggaatatcgccgcaagccgtttttccttgtccacattcaccttatacatgcggaccttcccggcatattcttcggccagcgactccataaccggccccatcatcctgcagggaccgcaccacggggcgtaaaaatcgattacggcgggcaggtcgccctcgtatttccattccggattggcccggaagtcataaatccgcgtctggaattccgttgtcgtcagttcgattgctttcatagtatgctgtttttcagtcgccgcaggctgccggccgaagctgcaatgccgagcatttgtgcaactgccgttccgatccttgctttccgaatcgtcttcaggccccggctctattcaataacgcaaaaatcggagatttcatatgccccggcgacatccggggaccgtcaacgatgagccggcgacgtattcggcgacatatccggcgagggccgtcaaggcactcccctatgcggctctgcatgcagtccgactacagatcggatgcaatttggatgcggtttggatgcagtctcgctacggttaatgcagctctgtatacaggccggctacagctcagatgctgttcagaagctgtcccgccacagtcgatgcggctcggtatgcggtccgaataccgtcatgaacgcatctgaatgcgctcctgatgcagcccagagcggctctgcccgcagtccagatacgatccggatgcggatctgatgcggattttgcggtaaaaattcattttcggcgattttttccgagcgtaaattgcagaaataaaaaaatccgattatctttgcacctgcattgggggattagctcagttggctagagcgcttgcatggcatgcaagaggtcacgagttcgactctcgtattctccactattgtgaacaaggggttgcaaaatattgcgaccccttgttttttagcttcctgcaaacaattcgcacacgcattgacaatcacacgactttaaaccgaaaatacaatcctcacggatcgtggcggagcaggtcggtatcgagcgggtggcgggcaccgtcgtcgccgagcaggacaagacgaatctcgccgccgttgtaatcgaaatagcgcagttcgagcggatgcaggcccgcagacaacgcaacctgtccgctcttttcgagcagaggatgttctccgtcgttatcaaccaccaccctgccgccgatacgcaggatggcgccgtcgtcggaagcgagcgcaaaggtatagatcccggttgccggaatgtcgatatacccccggaaaatcatcccgacggcccggcggccggcagccgcacgagggaaacagaccgaatcgacgacacaacggccgccggcagcgtaaagagtctccggaatgccgatcgcgtcgcaaccgggaaaacggcggaagtaccaatcgacgcacaaaccgggttcagtgtcccgcggctccaaaggccgcgcataatcctgcttctcatagcggacggttatccagtcgcccgtacggccgtcggcatggtagggccggatgtgcagcatacaatcgtcgcggataaccagcggggcgtcgtaacgcggcgagtttacggtcggcaccgagccgtcgagtgtatagcgcaaaacggcaccgggcagcggacagacgacggcagtccggaccgaatcggtgaagacgctgacagcatgataattcgtcagcgacggaatccgatagttgacaccctcatcatccagccgtcggcaatagtccagcagccgcgacatgaaagcgtcctcgtcgaacttgcccggctcggtccaccctttctcggccaaaacgagcaggcgcgggtaaaacatatattccgcacgggaccacgtggggattttttcggtccagaggttgccctgcacacctttgatctgtcttttctgcgcatcggacagcgagtccggcagcatatcgaagcgacagatgcgcgcgagcgagtttgcgtcctcttccagcgagaaatagaaccacgactgcggacagaggacgacctcacagccctgccgggtggccgcactcacggactgcggttcccacggccgccaccacatgaccgtagcaccgggaacggctccgccttccagtatctcgtcccagccgatcatgcggcgtccgcgggcttcgcaaaagcgctgcatacggtgcatgaaccacgcctgaagagccgcttcgtcaggcagcccttcggcacgcatacgggtctgacagtcgggacaacgtttccagttgctcttatcgacctcgtcgccacccatgtgaacatattcataggggaaaagttcgaaaagctcttcccagacactttcgcagaacgccagtgtccggtccttgcccacgcacagcggcgaagagaaggattgcccccacgaaccgcgtccgaaacaggccagccacggatagctgtcgatggcctgcaagcaatggccgggcatgtcgatttcgggaatcacgtcgataccccgaaccgcggcataggccaccacctcgcggatatccttccgtgtataatatcccccgtaaagcgtgtcggcgccatcggtccgcagccgccggacgggaagcaggaaatcgtcgttttgttcccgcgccgcgcggcccatgcacaacgtgtcctgccgattgaaaagccgccatgccccctcttgcgtgagttcgggataacacggaatctcaatccgccagccctgatcgtcggtcagatgccaatgaaatttgttgagcttgagccgggccatctggtccagcagcgtaaaaatctcctctttgtcgaaaaagtgccggctcacgtcgagcatcacgccgcgccatccgaacgccggccgatcggcgatctccgcataaggaatcttcgctccgcttccggctttcgctggcaacagctgccgcagcgtggcgatgccattgacgacgccccggtaggaaccgcccccgatccgtacgccggcgtgcgtcaccgacaggcggtacccttcaggcggcaaggcggccgaatcgagttccaacacgatatctccccggtcgcaccgatctacggcgacagtgccataaggcgccagcacctcgttcacgtagccggccgcggcgatgagaaccgtatcggcgatgcccaactgcaaccgttcagggagccggtaggtcccgtcgccccatatcgttttctgcggagcgggaatcagcacgggccgttcatccggcgcaggcccggtgcaggccatgagccacattcccacagccaacgcagcataaatgcgaacaagtgtcatgcgcccggtcacgatcaattgccgtttgcggccgttacacgtccgttcctgcgcagagccagcgtatcgccgtactgagtctgcaggcgcaccagctcatccgtcatttcccgccggggcgcagcatattccggcaggccgtaaaggttccgcagttcgtgcggatcttcctgcaggtcgtaaagctcccattggtcgatgtcattgtagaagtggatcagcttccagcggtcgttacgcacgccgtaatggcgcttgaccatgtgttcggccggatattcgtagaaatggtagtacaacgagcgccgccagccagcaggatgttcgccccgcagcaacggcagcagcgaaacaccctgtatgtcgtcgggcacggcgactccggccagttcgaggaatgtcggcgcatagtcgatattctgcaccatttcgacgatgtcgccgcgggcaccgcccggcagacgcatcaccaacggcgtgcggaacgactcctcgtacatgaaacgcttgtcaaaccagccgtgctcacccatgtagaaaccttgatcggaagtgtagaccaccagcgtgttttcggccagccccgactcgtcgagataatccagcaggcggccgacattgtcatcgagcgatttcagtactttcatatagtcacgcatataacgcgtgaatttccattgagccagttcacggccctgcggattacggcggtagaaatcctcgatcagcggcgtatagaatcggtcccacgccgcccgctgttcgggattcatccgcccgacaaacgcttcgtaggtgcctttcaggcgactccgcttatcgggccgccacattttgaggtcatagatcaggtccatgtccttcataatgctcatctcctgcgctgcggcggccggacgcccctcgtaatcatcgaaaaaagtatcgggaagcggaaagtccagctcttcgtaaagcgccagattgcaggtgtcggccatccaattgcggtgctgggccttatgatgcaccagcaggcagaaaggtttctccggatcacgccccgaacgcagccaatcgagactcttgtcggtaataaggttggttatgtacccttcggaacgcaccgtatcgcccgtctggcggataaaatcgggattgtagtaatcgccctgtccgggaacgatctcccaatggttgaacccggtgggcagactttcgagatgccatttgccgacgacagccgtttcgtatccggcctgttgcaacagcttggggaaagtctgctgcgtattgtcaaagacgcaggtcgtgttgtcgtaaaaaccgtttttgtgggaatgcttgcccgtaagcatacaggcgcggctgggaccgctcaaggaattggcgacgaaactgttggtgaaacgcacgccctcgacggcgatgcggtcgagattgggcgtcgaagcgtaacgcgtatcgtaacagctcatcatttgcgccgtatggtcgtcggtcatgatatagaggatgttcatcggacgggccggcgcttcggactgccgggcgcatcccgtcgcagcgacggcggccaaaccgccgaacagaaagagtcttttttccatattccagtagtttttatcgctgaaaaagcgcaggggcgtattgcagggcccctgcgctccattaactcggttctaaattagcaaaaaagagcgaacggaacaagagttacatattgtccatatcgggcgcccattccaatccggtcgcagggccgtaagactgcgggtcccacaagtcgccggcacgcgaatattcgcattcggcggtattgccgttgccagtggcgtcctcaaacgtgtacccatggccttcgttcatcttccagtagcccagcaggccttcgctcttgggatcgacgttattcacgttgttcttgagctgagtggaggtgcgggccacgttccacaggcgcacttcgctgaacgagatggtcgtattgcagtagctgggctgcggcagcagggcaaaatacttgaacgtaacggtattgcgcggagccgatttctgtacgacctgctcgccatcgaggtaaaggctcgtcgcggagccgtcgaagacgatggccacatgctgccacttcttcgcctcgcagggcgtcacggcagtttggccgggctgggccatggtgttcatctgcatccaacggttcaccacatccgaagtggtggacgaagcctcgaagcggacccacatacggttgttgatatttccctcgccgttgtcgaaaccgacgatcatgtagttacgggccgtgaactcctctttgtacatcttgaactcgatggtataggcattgaaggtgatgggcgcatccttcatgttcagcatcacacggttcagtttgctggagcctccggtccggtattcgctattgaagatcggaacgggaatgatcttctttcgctcgcagacgatcaggaaatcggatgcatcgcccaacatcttcataccgccgcttacacagcgcagcgtcacgggcagagcgtagacagaacccgaatcatccatctcttcggagaagggcaggatgtcgatttgcgcaggtgcggcagtcacttcgccggccggaactatgacaggatcggcaggcagttcaaaacaggtttccggcaactgtacgtatgaagttccgttaagtgcattataacgctccagcacgtcgggattcatctcgaagcggaaagcggtctctgtatcgcccttgccgcccagacgaacggtaagcgaagtcttaccgccgtcatcctcgaccttgacggtcgtactcgacgctttctgagcctctttgatataggcggcattgtcgagcgcaccgagatcggcattgtcgcagccggtaacgagcccggtcagcagcgcacctgcgaataaggcccggcaggtgcggatattcagcatatttttcataatctcattcggttttattattgctggtcgtcagcttccgttccgcccttttccaacttgtccatggcgttgatggcggcgcggaaatatttgtaacagtcattcttgaagtcgttctgcatctggtaagcgccgatgccgcccttgcgaaatccgttggccggctgccagagcgccatggcctgcagcgaattggtgtaggtcccgtccggaaggcgacagctcgttccaccgtatttccacatcgcctcgggttcgaaattctcggtaacaagagtgcggttggtgatggtctcctcgtcgattatgtcaccgaaggcgttgaccagcccggccaaacggtaggaatccagcgaagactgggctgtcaaagcgtatgtctgcagaatatagtaatcaaagcattcgattgtctccttaggcatcgacgacaccagtccgtcaacgatcagcagtttgccgcttcccgatttcggaccgagacgtttggagcattcatcgacgaaccacgtcgtacgctgcgagggggaggtgccggcatagatatcgccctgctgggactgattcatcacgatattgccgttgtggtaagaccccaaaccgggttcatagtcgaggtcgagacccgtatagccgtacttgagcacctcgtcgaccaacccgttggcgtatttgcggatggccgcctcgatctgggcggcatctgcatcgtccgtccagccccaatactcgcgcatcaggcgcacctgctcccatgtatcctcgacaccggcggtcacctcttcgggcgtcgccttggcgccgacgttggtcagcaggatggtcacgaccacgtcggtacctttcagcttcttgacctgaacaacctcttccatctgttcgggcgtaagggaaaaagtcgcccagttggccaccagcgaaacgctgtcgggaatccccatcaggctggtcgccgtcgtggcccccgtggggtcccagccgccgaaccaaccgaaggcgatgggatggctcttgtcggctttccatgcacgcaggttctcgtaataggatgcgggcttgtgctgcgtgaagtcccgcgcttcgggttcggtccagtcgctgcacgagacaaaggccccggccgcgaggaccgctatcatcagggaaattatcttctttttcatatcacacttggtattttcattttaaggtcttatttcttcgcccaccacacatcggtgccgtgcaggtcactgccgccgagcaattcgacgcccctgagtacgttctcgcggttgttgtcgtactccgactggggatagtgcaggcggcgcattcccttgctgctgtctacattgccccacatgccgccgctcaggttgttgaccacctgcaacaggcggggatagcccgtccggcgcacgtcagcccatgcttcgtggccgatcatatggttggcgatccatttctgggtgatgatgcgctccagttcgttgccgtcgtcagcccatttgaccgatacggccgtaccgaaatccgaaacgttatgcttgttgcgcggatccgcataggagagcgcgggagccgtttcggaagcgatataagtctcgtacgaagagccgtttccccaaagttcgagcgaggttttgacacccgtgttatagaggttttcggccgtgtcgcccatcgtccagcccagcagagcgccctcggcacgcaggaaccagctttccgaagcgtacatcaccggcacggggtccttttcggcgaagagcggataagagtaggtcgcatagtcggtcggcgtcacattctgaatgcccgcacgcacaccgacgtagatcccgtcgtagcccgacttcgaaaaataggaagcccggcgcggatcctcgtaggcgttcatgtacatcacgatgctggcgttcgaccgcaggtcctgccaagaggtgctcgtcgcttgcgtgtagaacggattctgacgggaatcggacgagaagctcaggttctcggcattggcgtctatcagaccgtatgtcgccatatcgcgcacagcctcttcggcgatgcggcgcgcttccggctccacaccgctcatgcgaatggccatccgcagtttgagtgtattggcgaagctcacccacagccgcgaatcgcccttgaaagagctgatatcgaaatcgcgcatcagaatgccgtcaccggccgacgcgaacgtgtagagcgtctccatcgccgtatccaaatcgtcgatcatcgccatgtagacatcgcgctggctgtcgtaaggcaccgagaaggtgccgttctgcatcttcgaatagggaatcggaccgtaggcgtcggtcacgcgcagcatggccgccacgcgcaggatacgggccagctggtaaacgggcccctcgccgccagtctgggtctcgaccttgaagtagttgccgtagaaattggcgaatgtctgctcgaaaatatagtcgttgaatttgtccgacggattgtaggtagcgatgttctgtccttggtaggacttcacggcagaggtgtaaccgcccagttcgtcggccacaagcacgtcgtgcatctgcgaagcattgacctgaaaatgggtgacgaactccatcatcgcgggaaaaagaatgcccacgccgacgttgtcgccattcaggtcgtcgtccgacgggcggaaaggtttggtattgtaatcttcgaaattaccggtgcaggccgcggcggcgagcatggccacacaagccgcaaaacggccgaatcgacgaattatagtgtttgctttcatcttggtcaggattttagaattgtaacttcacggtaaatccgatgttccgtaagctgggcagcatgaagtagtccacgccctgcaagaagttgtcggccgtcgagggcgtcagttcggggtcgaacggagccttgttgtaaatcatccacagattgcggcccacaagagaaacggtcattgccatcttctgacggaaccagcgcttgggcagcgtataggccagcgacagctcctgcatacgtacgttggtcgcatcgtaaatgtagtatgcgccggcacccgtgccggcaccgatggtctgatagtaattctgggcatcgaccatgccgttgtttatccgcacgccgccggcctcacgggctgccgccgaacgttccgaaacgccgtagtaatcgaggaacgcctcggtattcgaaacgacagaaccgcccagacgggccgcgaacatcacattcaggttcagtcccttccatgcaaaactgttgctccagccgatattgcccttgggcagcaggctggcgaccttgcggcgctcggtggtggtcagttctaccttgttggtctgcggatcgacataaatgtttccgttgaggtcggtgcgcagttcgcggttgatgtaaaggtcgcccatcgtgccgccttcgtagaggatgacctgcggcgaaccggcgtcgccgagggtcgccttctccagatagggcatatcgataggctgtccgtcgacggggctgatgacgccgttggcgagcctgatgatcttgttgcggttcatcgtgtaggtcacgctcgtgttccatgtgaagtctcgccacgtattatggtagttcagcagcatttcgagacccgaattgcggacctgaccggcctgcacgagtaccgacgaataacccgacgtggacgaaggggtcgattcgaaggtctggttgaaggtatccgagcggtaccatgtagcgtcgaagttgagcttgccgccgaagaaacgggcattgagacctacttcccacgacttggtcttctccggcttgaggttctcgttggggaagcggtgaagcgagtcccactcgtgcgtctgtcccttgtaatcatagtagggtttggtcaggtaggccgcataggaagagcctacggccgaataggaaccgcgcaccttgaggaaggagaaccattccggcatatcgaccatctcggaaacgacggccgaaagtccgaccgaaggatagaagaacgacttgtatttcgagaaggcgagagccgattcccagtcgttgcggccggtgacggtcaggtaaagcatactcttccacgccagctcgacgttggcgaagatgctctgcgactgaatgtgcgaaccgtcctcacgctccttatagttggtggtcgatatattggtaatcgagaagaagttgggaatcttgcgcaggtcgccaccccagcccatgaaatccatgcggacgtccttgagcgacgcaccgacattggcgctcaggtggtagtccccggcgaaggtaagatcgatgttggcgatggcatcggcatagatctgacggtcgttacgcttgatgatcgaatacatacccttctcgcctgcgaagttggtgtcggtgccggcatagcgcttctcggtaatgtccatatcggcgttatcgaccttgacgcggcccgtcacgtcgagccaatcggttacgtcgtacttgaggttggcactgagcatataacgacgctttttagtctggttgatcatcttattcatgatccagtaggggttctggaacgacatgtcgcccgaaccgtaatcccatgcctgcgtatagaggttgcgcgattcgtcccaacgctggtagagacgcacgttgtcaaagtcgtcgccgcgcggaaagagatagagcgccggcagcgggttgaagtatttgcccgctgcgatcatgttcttgttgtcctgcaggatgtagctcgcactcagatcgacggtcagcttgtctttgaggaacttggtgacgtcgcggaacgtgaagttgtagcggttgtagccgctgttgggcaggatgttgcgggcattggtcgtcgcggccgaaaaataggtctggtgcttctgcgtacccgtcgagaaggtcagggagttgttgacgttcgaccccgtgttgaagaatccttcgggatcaaagcggcgcaaggttttgtcgccccagctctggtaggacccggaaacattgccgtaggtattctggaagcggggcatcacgaaaggcgacgagaaggtggtgttgttggagaaggtcaccgacgttttgtcggcctgtcccttcttggtgttgatgagcaccacgccgttggcagcgtccgaaccgtagagagccgcggctgaagggccggtcagtaccgaaatcgactcgatgtcgtcggggttgatgtccgccacgccgtccgaccccatgtaattgccctgcaggccgtcgtcattcgagccgaagctgacgttcgacatcggaataccgtcgatcacatagagggcgttgttgtccttgtagagcgatttggcaccgcgcattaccacgcgggccgcgccgccgacgcccgccgccgaggagttgatctgcacaccggcgaccttgccgttgagggcattcatgaagttggcgtccttaaccgtaacgatgtcctcggatttcacctgctggacgttgtacgagagcgccttttcctgacgtttgataccgagggccgtcaccaccacgttatccagcgcgacggccgattcgaccatcgtgatacggaaatcggcgcggcttcccacagcgatctcctgcggttcgcagcccaaataattgaccacgagcaccgggtccttcaccgaagcgggaatctgcagtccgaaactgccgtcgacattggtgctgataccgatcgtcgtacctttgataacgaccgacgcgccgataatgggttgtccgtgtgcatcgagcaccacacccgcgacattgcgcagggatgaggatgccgccgcatccgccgaacgcttcgaaagaatgatgttcgaactgttgatctcatacgtcagatcggtgcctgcgagcatttgcgcgagagcctcggcaaccggctgttcgcgcacctgcacgctggccgtgcggtcaacgctgatattcttgtcgtaaataaacagaaatttggtttgtttttcgatctcatccattatctgcgtcattttcacctgttgcatatcaatagtcacacggcctgcctgcgcccggacggtcccggcggcaaggcacaaaaacgcagcaaaaagggagattatcaggttctttgattgcctgatactttttttcttcatatctttgtagattaaaggataatagttttggttagtcgcaaatcatgcgagagaccgttgtcctttccgcccggaactgctccaacagtttcgggcttccttttccgggataacggcaaaagacaaaatgcgggattatctcataggcaggcaaagttttaaagttatacgttcggtcagtatatggttatcgtgctggtttcttggtcgtatgcgtagtggaaagaacaactgcgctgcaggatgcgcagggcgtgttcgatgccgtccgaaatgcggatcttacccatcgcttcaatatcgggcatacggtcgagcttcacatcgaaacgcacgccgtaacagtgttcgaaccggtggagtatatctgcaaaactgcggccgctcaccgaaataaggccctcggcccagagatattcgttgggatcgtccgacgtacggagcgacagttgcccgccgctcaactgcactttttcgtggggtttgagcacgacctgctgctgcgggtcggcaagggaactcacccggacgctgccgcgcatgagcgccgtagagaatacatcgtgccgctcgtcagcattgacgttgaagcgcgtgccgagcacctcaaccttacaggcgaacgtctcaaccacgaacggccggcgggtgtcacggctgacatcgaacagcgcctcgcccgaaagccgtacctgccgggaatttcctgcgaaaagcgacggatattcgatctcggcccccgaattgagccacacattggtaccgtcctgcagcgtgagattgatgcgctgtccttcgggcgcagccacgcgggtcataagattcgcccagctccgctccttataggaaacatatccccaaccgatgccgacggccaatataacgacggccgccgcctgtacggcatacctcgttacacggcgccaattcagcagacggccgcgcgcggccttttcctccggagcgaacagcagcaatgcattgtacattccgcgttcgcggtcgaagatacgccggttttcctgatcggcatcgagccactccatcagacgccgctgttcgtcggaggtggcttcgcctttataaaaacgatataaggtttctttttccatattacgacacgcccgttccggggctttacattaataaagcaccccggcggcccggtttcccggaaaaaagaacattttttttgattttatcgcagaatgcgctccagaacgcctgcggcaagcaccagtggcaggtaatcacgcaggacttcgcgcagttttccgagcgctttctcaagctcggtctccacacggcgctcggtgatcccgcactcggccgcgatttcgcggtaggacttgccgtggatgcgccgggccgtaaaaacctgccgcgtcagttccggcatttcagccatgcaatcacgcaccagtttctcgatctcgccggcaaaaaggtgttgaggatcacaaagctccagcgagcggatattctcgctcaccacgcgacgctgaaggtcccccacttcgttgtggacccgcatccgcacctgcagggcccgcaggtaattcaggcatttgtggcgtatggtcgtgaggatataggccgcggcattgcagtccgcatcgagccgggagcggttttcccaatagtagatgaaagcatccgtgacgacatcctcggcgatgagccggtcctgcacatatccgacggcaaaactttcgaaacgggctttgtagcgtttataaagctcgccgaactcggcctccttatgcagggggggggtaatgacgttgcggtctttcatcgtgggattgcaaaattcaatggagtaaaaatagcttattattttcagactagaaaacccggttccgaaaaagttgcccccaagaatctccgccggccccctccccgacaggataaagcggcacggaaggttcctgatttccgcctgaaatcgctgaatggcatgcgtccgtccacttccccgtcccactcttatatatatgataaccgcttccggttcgtccggcgaaaaaaagctgcggcgatccgcagtcaactgcaaaataccggctatagacccggattctgccgataaaaaaacgctgcggccggaataccggagaaaacgatatgcggctgcagacggaagcctacatctgtaaaaaatttgcgaaccggaataaaataattaaatttgtaattacccttatgcgatctaagggccgatccatgacaaaaaaaagtgcacaaatagcgttcgacgacgttctccggcaagtcaccgaagggaacgaagaggcattccagcaactctacctgcactatcacgaccggcttttccagttcgcacgcatgtatctgcaccagcagcaggcggccgaagacgtcgtcgccgatctcttttttcaactgtggaaaagccgcggaatgctcggcggcatcgaaaacttcaatgcctatatctaccgcgccgtgcgcaacagttgtaccaactacctgctgagcggctaccggaaccgtatgtccggctttacacaggtacaactgcaggtcagcatcgatcctgcggtcccggcggacgaggcggttgacttccaactgctgaacagcgcgctgaccgacgctgtggaacagctccccgaacgctgccgcatcatcttcaagctggccaaggaggacggcatgagccaccgggagatcgccgcggcactcgacatctccccaagcaccgtcgaaggacagctggccatcgccatgcgccgtctgaaggccgccgcagcccctttcctgaaaaaaatctgaaaaaatcgcaaatcggcttagtggtttctcaggtccgtcttgtcttatttgtaaacggacaatagacggaacccaatgactgattcgaaacatacgaacgacaacaattcattattcacccgtattcaggtaaaaagtccttgtgcagacgagcgttacagcgcagggaattccctcgcgcgcctgatgacgcgcatccacgccgacgcagtcaataaggctcggccggagcgcaactacaccaaagcctaccgcatctggctggccgcggcatcgctcatgatcgttttcctcacttccggctggctggcgaccgccctgcgtcccgcacccgaaatgctcatccgcaacaacgcatgggaaaaggtggagaacctgacgctggccgacggcacgcagcttacgctcaaccgcggcgcacaactgatctatcccgaaaaattcgccggccggacccgcgagatattcctgtcgggagaagcctatttcgacgtggcacacgacaaaaaacatccttttatcgttcgggccggggatctgaagatcaaggtgctgggtacgaaattcaatatcgaggcctaccccgattcggagaccatcaccaccacgctgctggagggttccgtcgaagtggagagccggctcagccgagagtgtatccgcatggttcccagccagcagctctcgtatgatattcagagcggcgaaatgaaactcagcacgatctccgactcgaaagagcccgtacgctggaaagacaacgtctgggtgctgcaccagacgccgttcacacaagtatgccaccggctggaacagatgttcaatgtcaagatcgtgattatgaacgacaagttcatcgggaagaaatttaccggagagttccgtttcggggattcgctggaatcgatcctcgaagtcatccgaataaccacaccgttcacttacgaacgcgaggaggatacgatcatcctcaaataaaaaccgaacctactgcaaacaacctaaaacccgaacctgcctatgaaataagcctgtcataaaaaaaacacgggaacctctgccgaagttcccgctcccttaatgaatcaaaaacaaacccggcgggccgctacccgcacggatctatcaatccatcaatcagtaaaggtatgacaaattttgataagttcaagacttattgccgaaaattttgcgttcagacccgactcgctgttcgcatctgcctgtcaattacagcaataacaactttcgccacacaagccgccgcgcagaataatccgcaggaaatacggctcgacttcaacgatgcggcgttgtcgcaggtgctgaaaagcatcgaaacgcaaagccgctacaccttcttctacaacaacgacatcgacgtaacgcagagcgtttcggcgcacatcgccagcagcgacatcaattcggtcgtcacggccgtcctcaagggaaccgacatcgcccataggattacggacaaccgagtagtcctgttcgtgggggggggtgacgccgcagacgatcaggagcgttcgatctccggcaaaatcaccgacgcggccgggctgccgctggtcggcgtgacggttctggtcaccggcactaatttcgccgccgtgaccgacgtcaacggcggctatacggtccgagttccgggcagcggagccgaaatcgtctactcctatatcggctaccagagccagcagcggatcgtcggttcgcagacggtcatcaaccttgcgctgcaggaaagcaccgcagagatcggcgcggtcgtggtaacggcgctcggcatcaagcgcgatcagaaatcactgacatacaacgtacagcagattgcgggcgacgacatcagcatcgtcaaggacgtaagcgtggtgaacagtctggtcggcaaggtggccggcgtgcgcatcaaccagtcgtcgtcgggtaccggcggttcgacccgcgtggtaatgcgcggcgccaaatcgctcttcggcgacaacaacgtgctctacgtactcaacggcattccgatgatgtcgctccgctcgacccagtcggacaactattacgaaggtgcgggcgtcggcgacagcgacggcatttcgagcatcaatcccgacgacatcgagtcgctgtcggtgctgacgggtgcttcggccgcagcgctctacggcaaccgcggcgccaacggcgtgatcctcatcactaccaagaaaggcagtgcggaccactcgacgcacgtctcctactccaacaacacgaccttttcgaatccgttcgtcacccatcagttccagaacacctacggccgtcagtcgggcgatttcaagagctggggcgagaagctcggcaagccctcgtcgtacgaccccaacgatttcttccagacgggttacaacacgcagaacaccgtcagcgtggcatcgagttcggagcgcagccagtcgttcgtttcggccggttcggtcaattcgcgcggcatcattcccaacaacgaatattcgcgttacaacttcacgatccgccacggacgcgagctggtcaaggacaaactcgaactcgacaccgacttcttcttcaccaagagcgagtcgcagaacggcgtggcgcagggactctactacaatccgctgctgcccgtttacctcttcccgccttcggagaatttcgagcgtctgaagacctacgaaatctacgactcaggccgcaacttcgccacgatgtattggccctacagcaatacgggactcgacgccctgagccagaacccctattggatcaccaaccgcaacatgttcaacaccacgcagaaccgctatatcgtcagcggctcgctcaagtggaagatcaccgactggatcaacctttcgggccgtatccgcatggaccatgccgacaccgactacgagcgtaaactctacgcatcgacgccgggactgttctgccagtcgaaagggcactaccgcgagcagaagatgaccaataacgcgctctacgccgacgtactgctcaacatcgacaaacagctcagcgacgatttccgcctgacggccaacatcggcgccagcctctacgacgaaaaatacgacatgatgggacagagcggcaacctgctgcgtcttgccaacttcttccacgtcagcaacatcaacatgtcggacccgacgaccgaaatgacccgtgaacacatccgccagcagacgcaggccgtctacggatcggtgcaggtaggcttccggaatttcgtttacgtcgatgcgtcggtccgctcggactggttctcgacgctggccggcacgccctccatgtcgtcggtctatccttcggtcggtgcatcgctgatcctctcggagctgattccgcagaacaagatcctcaactattggaaaatccgcggctcgtacgccggcgtgggcaatcccccgtcgccctacctgacctacacctacattccgctggaggaccaaaacatcagcaccgacggtttcgctgccgcttcgcacctcaagccggagcttaccaaatcgttcgagatcggtacggagctgcgcatgttcaacaacaagctgagtctcgaattcacctactacaacaccaacacccacaaccagctcttcaagtacgagattccctcgtcgtcgggttactcctatgcctacgccaacgccggcaaggtcaataaccgcggtatcgagctgaaagcgggcttcaaccagaacatcggtcccgtaaaatgggagacgacgctgacctacacgcgcaaccgcaacgagatcaaggaactgctcgacgaatatgtgaccgaccccgtaacgggcaccacggtcaaggcgccgcaggaattcatcgtttcgacggccgagtcgtaccgcatggtgctgaccaaaggcggcacgatgggcgacatctacgccacacacctcaagcaggaccccaacggctacatctatgtgaacccaatgaccaacggcatcgaaatcgagcctaactcctatgtcaaggtcggctcgatagaccccaaatacacgctgggatggcacaactccttctcatggaaggggctgaacctcggatttttgatcgacgcccgcgtcggcggcgtggtcgtgtcgggcaccgaggcgatgatggaccagtacggcgtatcgaaatcgacggcccgcgaccgcgacaacggcggcgcgatcgtcaacggcggacgcatggacgccaagacgttctattcggtagccgccagcggcaccacgggcgtactttcgaactacgtctacagcgcgaccaacgtccgcctgcgcgaactgtcgctgagctacacgctcccggcactggcccgcgaacgcctgcgcatcaccctttcgctcattgccaacaacgtgctgatgctccacaacgaggcgccgttcgatccagaactgacctctaacaccgggacgtactatcagggcttcgactatttcatgccgccgtcgctgcgttcatggggtttcggcgtaaaagttaatttctaaatcaggagagacaggttatgaaaaaattacgcaatacgatcgcttgcggagttgcggcactcgcactcttggcaacgggcctgacttcgtgtacgggcgacttcgacaatatcaacaccagcaaagacaaacccaccccagaagacgtggaccgcgacaacgcatgggcggcgttcatccaaaccatgcagcgtaacgtcttcgccgagggcgccaacgcctaccagctggccgacaacctgctgggcgacagctatgccggatatttcgggcaggcgcaggactgggacagcggcagcaactcgacctgctacgcctttcccacggccaaatggaaggacgaaccctacaagcaggcctacaataacgtgatgagttcatggaacatcctgcgccagaaggtcgattccgcatcggtggtcttcgcgctgggagaggtggtcaaggtgcaggccatgcaccgtgtgaccgacatctacggtccgctgccctacaccgccttcggcaaaatgtcgagcggcctgccctacgactcgcaggagaccgtctaccgcaccttcatcaaggagctggaccatgcgctgaaaacgctcaaggccgcatacgaagccgattcgggcgcgaagcccatcgccgacttcgacgtggtgttcgattcggatctggaaaagtggatccgcttcgccaactcgctcaagctgcgtctggccatgcgcgcacgcttcgccgctcccggcgatgcccagacttgggccgaggaggccgtaaatttccagttcggagcctacaacatcggcgtgatgaccgacaatacccactcggcccagctgctcacccgcacgggcatcggcttctcgtacaaacacccgctcgaatacctatggggcgaatataacgaatgccgcatgggcgcaaccatggagagctacctgtcgggatacggcgatccgcgtctggaaagctacttctcgcccgccgaaaaggacggcgcctaccacggaatccccaacggcatcatctccaaccccaaggactaccagtcgctggccagctgtcccaaagtgggcttcacctcgccgctgacatggatgtgcgccgccgaagtctgcttcctgcgggccgagggtgcactcctcggctggaacatgggcggcacggccgaaaacctctacaacgaaggtatccgcacgtcgttctcccagtggggcgcgccgaacgccgacaaatatctgtccgacagcaaaagcactccggtgaaatatcccggcttggggcaggtcggctcgatcgagagtccgagcagcgtcaccgtcaagtgggccgccgacggccgtgaactcgaacgcatcatggtgcagaaatggatcgcactctaccccaacggacaggaggcgtggagcgaaatccgccgtacgggttacccgaaggtattcccctcgcagaccaaccgcagcggcggcgtactgccctccggcgcgacgatccgccgcgtgcccctgccgcagcaggagtacgacggcaatgccgagcaggtggccaaagctgtaaatgaattcctcggcggcaacgacaactgcgcgcagaaactctggtgggatgccaaataaattacgaacctcaaaaagtctgaaaaccatgaacaaactcataaaattaggatgtatcgcattggcaggcaccctgttgttctcgtgtgagaccgatcccgaaaaactggagattgtcaagccctaccccaagtcggatcagtactacgccgatctgcgcgactataagaacagcgaccatgaaatcgtcttcggctggttcggaaactggagcgccacgggagcctcggcgtccaactacatgaaatccctccccgacagcatcgacatggtcggtctgtggggcggctggcagacaatcaccgaagcccagcgtaaggatatggaggattcccagcacaagcgcggtctgaaagtgatcgccacttcgcttttcgacggattcgaaatgggcgtggcgcccgacggcgcgacggcggccaccgaagaggagatgctggcctactggggctgggaaggtccctaccgctcatacggcaacgacaacctcacggaaggcaatatcgcggccatccagcgttttgcgcatgctttctgccaacgcatcatcgacaacggatacgacggacttgatatcgacaacgagccgaacatcggcaccggcaagaaaccctacggcatatcgggcttccccaaccgctacaaagtcttcatggatgtcgtagtcacctatttcggccgcacttcgggcacgggacgcatactggccatcgacggcgagctgaacgccaacatgccccgcgaattcggcaagtgtttcgactacttcatctcgcaggcgtacggatgcagcggcgattcgaacctcgacggacgtctgcagagctgtgccaactacttctcggaggttccgttcaaggacgttgcccgcaggtttatcgttaccgagaatttcgagaacatcacctaccgcaccaacggcggtgccaactacacgacccgcgacggcgagtcgatgaaatcggtggccggcatggcgcagtggcagccgatcatagacggagaaaaggtgatgaaaggcggctgcggaacctatcatatggagtacgaataccgcaatcccgaaccttacaagttcctgatcgaggcgatacagattcagaatcccgcccggaagtaatcgtttaacggacaaaaaaagaaattgccatgaaactgaaatatagtttattcgcactgatcgcattggcggtctcaggctgccagaaagctccggtttacgacgatgtggtctacatcgccggagccgaaggcgaagtccccaccctgtcgctcacactcgacgaccagtttcccaaagagctgagcgtaaaggtctcgtcgtcgatcgtcgtcggacacgacaccaaagtccggctcgtaaccgacccttcgaaaatcgaagagtacaacacacagtacggtaagaagggcgtaatgctccccgaaacgaacttcgtgctcaagaacaccgaactgaccattccagcaggttcgttttccacagccgaaccgctcgtagtgagcgtaaccaaagacgaagggcttaaggagggcgtcagctatgtcattccgctgagcatcgagagcgtggacggcgatttgaaagtcaaggagggattccggacggtattcgtcgaaatcggccgtatcatcatcggcccggctgccgactgttcgggcagcacctatttcaaggtcgatttcgccgagggcgagcaggacaaatacgacatctacaacttgggcgaagtcacttacgaagcccgcatcaacctgcagcgctggggcggctggtgcaatacggtgatgggcctcgaagagaacttctgcctgcgtttcgtacaggacgacttcaaaggtcagctgcagctctccggatggggcggcacactgatggttcctacgggcggaatcgccgtgagcctcaacaagtggacgcatgtggcggccgtattcgacggtccgaacaagaaggtgagcatctacatcgacggcgtactcgcctgctcggccgacaccaacaagacttcgctggacctcacgcaggtatatcaggacgactcgttccgcatcgccaattcgtgcaacgacggccgccagctgaagggttacatcagcgaagcccgcgtatgggccaaggctctcaacggcaacgacctgaagaacaacatgtgctatgtagacccggcgacggacggcctgctggcatactggcgcttcaacgaaaaagccgacggcaaaaaggtggaagacgacctgaccggacacggatacaaggcgacctactccagctcggccatgaaatgggtggacaacgtccgctgtcccgaatgacgaccgacgtaatacgaacaacaaacaagctgccttttcgggcagcttgtttatttttccgatttccggcttcggattactcgaagcggccgcgcacccggaggtcgcacaacggactgagcgcatcgctcaccagcagttcgacatgcacgaagtaattcccgctcccggccgtgcggccgtccacgcgcaatacgaacgttttcgcccggcccgccgcaatctcttcgcccgccgcaatctgccccgtcaccccttcgggatatttcaccgcatagatcctaagcggcgaaccgcccttgttttccaacgtaaaccggcactcggccgtgccgtcggcggcgcacgttccgaaatccagcaacgattcggcaatttccgcctgcggacgtttcccgcgcggcatttcgcgcaattcggccaagtcaccgataccggttccgcgcaccacgaccgccccttcgagccgccgtccggaaacggtcagataacacgaatcaacgaacgttccccacacctcggcagcggacaagtcacagatgaaagcgatctctccctccgcaccgggcgccagtacggcaggagcttcggcccgcagaaagggaagcggttcagcgaattccgccctcagccgcacctcgtacggtgacgtattgagacagcgcaacgtcagacgccggtcatgccgctgctccaccatgcggaagttgacctccttaacgctaaggcggattccgccgccaaactccacgggaaagcggtcggcagccgtttcgggacgcgccgccacactgccgcggatacggagcggcatcatgcggctgccgtcggtatagacgtataccgccttgtcgaaagctcccggacggtccgccggatcgtaagctatcccgatttcgccgctgccgccgggaaggaccggcgcctgcgaaaaggtcggtttcatacatccgcaggtcacgccgacacgctcgacgacgacgggtttcgtaccgctgttcgtgaagcggaacacatgcacgacaggaccgcccgtttcgggaatcgtcccgaaatcccacgtttcatggccgaacgccaaaggcggacgtgccaccgtatcgggccggatcgtctccgcggagtgatttccggcattggcaacgatattggcatcggccggagttccaccccgctgcctgcaggcaacggaggtcaatagacaagcaatcagcagaaaagttctaatcataaaaacagccgggagccgttttgcgctccaatcttcaaaattagcaattttccgcgtcagacacaagcatccggtccgaattgatcgcgccgggtgagatcgaaatagtccgacaagtttttttcagccaaggtgagaccgtaaaaccgcctattcgttcacgaccagcagcatcgtcagcaaaggcaggtaatccttgagtttgacacgaaggattttcagacactgctggatgcggtaatccaccgttttgggcgaaacttccagcacggcggcgatttcttcataggttttgcgctggaaacggctcatttcgaacgcttcacggtaggaggccgggagatcggccacggccgcccggatattttcgcgcagttcctcgacgacgtcgaagtcggggacttcgaactgctcgcacatcttattgcggatattgcccagcacgcgccgctcgatggactcgtgccccagataggtcaggcagttattgcgcacggcgccgaacagatattttgggagcgaagtgctgatacacaataccgtgcggttttcccacagccacagcatcaggtcctgcacgatattctcggcggtctcctcccgcttgacatacatgcgggcgtaggtgcagagagtcggataataacgtacgaaaatctcttcatacgccttcatctcaccatcgaccaaccggttcagcaagcaggtgtcggatatctttttccgttcgggcatgatgcgaaattaataaaaattcggatttagattccccggaataaaaaaaattgaaattttgtggttttcgtttaggaacttttgtttttgaatagtctgtaatataaaaagcagaaaaaacatgaacaccccgaacatagaaaaactccttgtcagatattacaacgacgaactgccgttcgaccagacggcccgcgtcgcggcgtggatcgccgccagcgaggagaaccgcaaaatcgccgaacaaatctattacatctgtttcgccgccgaaacgcaggaggcgaaagccgccctcgacaccgccggcgcactgcggaaggtcaaaggccgcatccgggccgaaaaatggcgccggacactccggcaggtcgagcgcgcggccgccgtcatgctgctgcccttggtcggcctgtcggcctatctgctgatgcaggtgggatacaaatacaacagcatggtcgaaatccgctccacaacgggtatggtcagctccgtcacccttcccgacgacacgcgcgtatggctcaactccaactcctacctgcgctaccccgccaaattcaccggcaaggagcgccgcgtggtgctctacggcgaaggctacttcgacgtgaccaaagaccccgaacgcaaattcgtggtcgaagcgcaatcgaccgagatagaggtttacggcacggagttcaacgtggaagcctatgacgacgaatacatccgcgcgacactcgtgtcggggcgcatcggcatgaagtacgacgacgccaaccaccgcagccaattggtgcagatgatgcccgaccagcagataacctacaacgcccgcacgggggtaatctacctcaacacggccaacattccgtgcaatacctcgtggaaagagggcaagatcgtcctcagcaacaccccgctcaaggacgccctgcgcatgatcggcaacaaatacaacgtctcgttcaacatccgcaacgacgaactgctcggaaacaccttcacgggtacgttctcgaaccagagtctcgacctgatcctcaaacacttctccatttcgtcgaagatcaaattccgacggatcgaccagacggccggcgacaaagcctcggcgggccgggccgtattcgaagtctactgaaaaaccgcacgaaccgatttacctacaaccataaaccaaaaaaccgaatgacaccatgacaccgacctgacacaaaaaaacatacggaaagacctgcacgtcctcccgtatgccgaatcgttaagatcacccggccgcatgaaacggccggactaacctaaaactcaattcttacaaacttatgaaaaaaatcttttccacccaaattatgggggggggaaatttacaccgtaccccggcagccggagtcagccgctcggtccggtcgtatgcactggcgttgtgcatggcgttcgcaatcgccgccgtccccgtacaggctcaggtaaaaaacatcacgctcaaggcttcgaacacccccgtttcgacggtgatgcagcagatcgaggagcagagcggctacaccttcttctacaacaccaaggatattccgctcgaccggaacgtcaccctttcggtcgcgaacaaggacatccgcgccgcactcgacgaactgttccgcaacaccaacgtcagctattcgatcgacaacaagagcatcatcctctcggcccgcgggggcgcgcagccgcagcaggccagccagatcaccggcaggatcgtcgataagaacggcgtgcccgtcatcggcgccacgatcatgatttcgggcaccacgcagggcacgacctccggcgtcgacggaacgttcgcactccagtccaacgtctcgccggccggcatgatcctcgacgtttcgttcatcggctacaagccgcagcgcatctcggtgaacaaccgcacgtcgctctccgtcacgctcgaagaggacgaccagcagatcgaagcggtcgtggtgacggcgctgggcatcaaacggcaggagcgcgccgtatcctacaacgtgcagaagatatcggacgaagtattcctgacgcgcgacgccaatatggtcaacagcctcgcgggcaagatcgccggcgtaaccatcaacgccagcgccgcaggcgtcggcggcgaaacgaaggtcgtgatgcgcggttcgaaatccatcgccggcagcaacaacgccctttacgtgctcgacggcattccgctgccgtcgctctcgctgaccaaccccggcgacgagttcaccatcatgcgcgagaacaacctcacgggcgacggcatctccaacttcaatcccgacgacatcgcgtcgatggccgcgctgaccggcccttcggccgccgcgctttacggttcgcaggctgccaacggcgtgctgatgctcaccacacgcagcggagaagagggcgtctcggtcaattacagcaacaacacgaccttcatgtcgccgttcctaaccccggccttccagaacacctacggagccaaggacggttattacgcttcgtggggttcgaagctcgtcaccaagcagtcgtggacgccgaccgacttctaccagacgggatacaacacttcgaactcggtgggactctccttcggcggtaagaagagccagacctatgtttcggcgggcgtggtgacggccgagggcatcattccgaacaacgaatacaaccgttacaacttcacggccaaccacagctcgtcgttcctcgacgagcgcatgcacctgagcgtgctgggcatgtacatgaacgtcaatgagcagaacatgctctcgtcgggccagtactacaacccgatgataccggtttacctcatgtcgccgagcgacgacatccgcaaatacgccgtctacgagcgttacaacgcttcgcgcaacttcccggtgcagtactggccgtggggatcgcagagcctgcagatgcagaacccctactggatcaccaaccgcaacatgttcaacacgggcaaggaccgtttcctgttcggcgcctcgctcaaatacgacgtgaccgactggctcgacatcacgggacgcgcccgcatcgactacacgcacatcacggccgagcagaagaactacgcttcgacgctgggactcttcgccggcgacaagggccgctattacaacaacacctacaccacctcgcaacgttacgccgacgtgctggccaacgtccacaagaccttcgccgacggagcgttctcgctcaacgccaccctcggcgcctcgatcgaggactacaagcaccgcgcgatactgctcggcggcgacctgacgggcgtgcccaacctcttcacgctggccaacatgaccaccaacaagagtcaggcgaaggagaccatcaacgaccagacgcagtcgcttttcgccacactgcagctgggttataagaatatggtattcctcgacgtgacggcgcgcaacgactgggtgacggcgctggccaatacctccaagacgtcgatgttctacccgtcggtaggtctttcggccgtgctgaccgacatcttcaaggtcgattcgcgcgtactgtcgttcgccaagatccgcgcatcgtacgccgaagtgggcaacgccccgatgcgctggatcaccattccgacctaccccgtatcggacggcacgccgcagacatcgacctacctcacctcggacgacttcaaacccgaacgcaccaaatcgtgggaggtcggcgccgacgtccgtctgtggggcaacaagctcatactcaacgcaacctactacagttcgcgcacctacaatcaggttttcaaccccgacatctcatcgacatcgacctacagcagcctctacgtcaacgccggccgcgtggacaacaagggcgtcgaggtgtcggccgagctgaaccagaacctcgatcccgtgaagtggtcttcgaacctcgtctactcgcgcaaccgcaacaaggtggtcgacatgctcgactcctacaaactgtcgaacggcacggtgatttcgcaggattcgatggtcatgggcggtacgacgggcgtcaagatggtgctgcgcgaaggcggccagatcggcgacatctacgtcaatacgctcaagaccgacgagcacggcgcaatctgggtatcgcccaccggcagcaacgtcgccccggccaaggacacatggatatacgccggcaacagcaatccgagctacacgctttcgtggcgcaacgaattcaactggaaaggtctctcgctgggcttcatgttcaacgcccgcgtaggcggcgtaggcgtatcgctcacgcaggccgcgatggactacttcggcgtctcggaacgcacggccacggaccgtctgaacggcggcgcgctcgtaaacggccagcgcattccggccgaaaactactaccagaccatcggcggcaacggtgccgacgccatcggcgcctgctatgtctactcgatgaccaacgtccggctgggcgagctgaccctcggctacgacatccccgtccagaagtggtgcaagtggatcaagggactcaacgtctcgttcatcggccgcaacctctggatgctctactgcaaagcgccgttcgatcccgaaacggtcgccggtacgggcaccttctcctccggcatcgactacttcatgcagccgagtacgcgcaacctcggattctcggtaaaagtgaccttctaacttcaacattacagtcttatgaaaaaagctaacggcataaaactcctgacgctggccggtcttatggcgaccgcggcctgcacgggcgattttctgaataaaaacaccaaccccgaccaagcgaccgacgagatgctgtcgtgggacaacctctcgacgggttcggccttcgcgcagatgaccaagaacgtcatcccctccttccagctggtcggcgacaaggagtacggcagcgccaactatcaagtcatcgaggacctcgcgggcaacatcttcgccggctacaccggagtcatcaacaccagcttcacgggcaacaacctctacaacgtcacgggcaaggactggtacaacgccatgttcaacgacgcctacacccgcgtcatcagcgcatggaaccagctcgatccccagcgcggcgaattccccgaagtggtcgccctcgccgacatcgtgaaggtcgccgcgatgcaccgcgtaaccgatacctacggtcccatcccctacctcaacatcagcagcggggacatcaacaaggcctacgatccgcagcaggcggtttacaaacgcttcttcgaggagctggacgccgccatcacgacgctgaccgcgttttacgaggcacaacccggcaccaaactgctggaggcttacgacaacgtcttttcgggcaacgtgagcggctggatcaaattcgccaatacgctgcgcctgcgtctggccatgcgcgtggtctatgccgacgcggcgctggcccaagagcaggccgcagccgccatcggcaatccggtcggcctgatgaccggcgccgccgacctcgcggagctgcacaaacccgccaccggttcgtgggaatacccgctttacatgatccagtacaatttcgacgactcgcgcatcggcgccacgatcgaagcctacatgaacggctatcaggacccgcgccgcggcaagtacttcgtggcgacggccaagggcgagtaccacggcgtacgcaccggcatcacgccgacttcgtcctatgccgattcggaagacctttcgcgcgtaaactgcaccaacaacgacaacattatgtggatgacgcccgccgaagcatggttcctgcgtgccgaatacgagttgcgctggggttccgagtcggacgcggcaacctattacgccgaaggtatccgcacttcgttctcgacgctcggcgccagcggagccgaagactacatcgccgacaaggagctgacgcccggcagttataccgacatggtcaccggcggcaactcgaatcaaagcccgctcgcctcgattcccatctgctggaaagcgggcagcaacttcgagacccatctcgaacagatcatcacccagaagtatctggccatgttccccgaagggcaggaagcttggtcggagttccgccgcacgggttatccgcgcatcctgccggtcctcgtcaacaacagtggcggcaagatcagcacctccaagcagatccgccgcctgaactacccctcgacggagtacagcaccaacgccgaagccgtcgcaacggccacgcacacactcaacagcgaatcgtcgaaccccacgggcgacaacggcggcacgagcgtatggtgggacaagaacccaagattataaaccgaaaacctgaacaaccatgaaaaagacaataacgacccttgccgtcatatttgcggtatgcgccggatttacggcatgcgacacggacgccgagccgctgaacctgcagccggcttacaaatactcggaagaatattacgccaacctgcgcgcctacaaggataccttcaaggaacgctcgctctgcttcgtatggttctcggactacgaccagagctactcgatggcttaccgcttcgcggggcttcccgacagcgtggacatctgctcgctctggggcggctaccccgatccggtcaagaatccgctggcctacaaggagatgtgggagatgcgcaacaagaagggcacccggctggtgatgcccacgatcatccgaatcatggagaacgacaacttcgccaacttcggactcacgtacgaagacatggtcaatcagacgaccacgatcgaccccgacggcgtttatcccgactggtgcgtgctctacggcaaccacctgctcaaagacgtatgggagtacggcatcgacgggttggatctcgactacgagccggaatcctcggacgaacgcaactacggaatctacggcgatcgcatgaccctgttcgtgcagtatctcggccagttcatcggcccgatgtcgcccaaccccgaaaaactgctgatcgtggacggacacaccccgcccgcagagacggagccttacctcgactactatgtgaaacagaactacggcagcagcagcgtctccttcacctcgacgttcccctatgagaagcaggtattcacggagaacatcggcgcctattggcagaccggcggcggcatggaggcgcaggcggcggccaaggccccggaaggccatttcaagggcggtttcggcgcattcttctgcctgcgcgactaccacacttccgattcgggcgccgacaaggagataccctacggccacctgcgccgcgcgattcagctgcagaaccctgccgtaacgaaataacctgaaacagaacctgaaccatgaaaaatatcacgaaatacatactcgcggccgcagcggcgttctcgtcgctcacggcgtgtcaggagttcgaagacttcgacaagaccatcgacggcactccgggactggtttacgtccagaccggcacggaaaacctctacacgatccgggtcgtacacaagcccaccggctcgaccggcgaattcttcaccgaattccccgtccgctgcaacaccacgcgccatgcgggcgtcaaggcgaccttcgtctacgacgcttcgctggtcgagagctacaatgccgagcacaagacctcgtatgcggcgctgcccgccgagtacctgacgctcgaaaacacgacgctgaccgtgcctgaaaacgcgacggcatcggccgactcggtcaaggtgacgctcacgggcaacctctcgctgctgaccgaacgcaactacttggcgccgctgcgcatcaaggccgagggcatcgacgccagcgaagtcatgggagcggtctatgtggccgtagcgaccgagatcaacctcatccgcgccatcgaatccaccgacgacatggtcggcttcaccgccacgggccgcagcgcgtggacggccgactgcggcaattacgccaatctgttcgacggcagcacttcgacgtcggtcgattttccggaacagtacggcaacgtgctcaatatcgacatgaaagagccgcaactggtgaccggactctgtctgggatacggctccgtgccctcggtgtcgatcgaatacagcgccgacggcgagacgttctcgcaggccggaactcccgtatcgggcgaatacgtgacgagcggctcccgaatgtacgccgcattctacggacatatcgaagcccgctacctgcggctgaccatcggcttttcgagcagctggagcaaaaccctttccgaaatcgacatctacaagatcgacagcgaagatccgaccgtctatgccgtaaccggcacggaaaacctcatcacgggtaaaatcacgcaccggcagaccggttcgaccagcgacgtgaacgcttcgttcagcgcatatgcgacggtagcttcgacgagcggctacacggtgtcggtcgcagccgacaactcgctggtcgccgcttacaacacggcccacgacacttcgtacgcggcgctttcagccgaatacctgcaactggacaacagcacgctgacgatcgccgccggggcttacaaatccgaaggcgaagtgacggtttcgctcaagggcgacctgacacggctgggtgacctcaacggttatctcgcgccgctgaaactctcctcttcgggcgccggcaccagcgccggccgcggcgtggtctatctggccgtgaaagtcgagcaaaacaagatccgccccatcacgtcggtagacgacatggtcggattccccgccgcaggccgcaccgcatggacggccgactgcccggattacgccaacctgttcgacggcagcgcctcgacgcggaccaacttcaccgaccagaacgacaacgtggtgaccatcgacatgaaatcgacgcatatggtgaccggcatcgacctcaacagtgcaggcatctcgtccgtttcgttcgaatacagcaccgacggacagaccttcctgacggccggcactcccgcatcgaacgaatacgcgacgtcgggttccgaccgctacatcgccttctacgactacctcgaagcccgctacctgcgcctgaccatcagtttctcaagcagctggagcaagtacatcagcgaattcaacatctatgagatcgagagcgacgaacccacggtctacgccatgtgcggcagcgacaacgtgctgacgggcgccatagcccacacgccgggcggttcgttcaacggactcaacgcggcgttcaacgtctactgcacggtatcctcggcaagcggatattcggtatcggcaacggccgacaactcgctgatcgcagcctacaactcggccaacggcacctcttacgccgcacttcccgacgggcatctgctgctggagaacaacccctgcgccatcggcccgaacaacaacaagtccgacggacaaatcaaggcctcactcacgggcgacctgacgggcctgaccaatgccaaaggctatctcgtgccgctgaaactctcggcgcaagacgcggtgaccagcagcagccgcggcgtggtctacctcgtcatcaccccggcggaagagcttttccgcaagaacttcaccgtggccgacatcacgggcgcgctcgtggccgaccgttcgggctggagcatcaccggcggcgattaccacagcggaagctggccggaggtaatcgacgacagcacggacaccttcatgcgtccgtggggaagccccatcatgtttacgataaccttcgacaaagagtacgagatgacgggactccgcatcacggcccgcacggacaacgcatcgtatcagaactaccagcccaacgccataaccatcgaatacagtctcaacggcgaagactacaccgaactcggcacggcggccagcgccgacggcagtctgctgaaaaacgtcccctcgtcctatgtcgcgctctacggttcgcagaagatgaagtacatccgtatcacggcatcgtacggcagcaacatgggcgtcggcgacttcaacatttacgcaaaataaacctaaacagagctatgaaattcaatcatattctttccggattggcgctctccgcggccgtactggccgccggctgccagaaatcgctggaatattccgacgtggtctatttcacgggcaccgagaattcgaacatcaccaacatgtacgtcgacggtccttcgtccatgggcgtcaccgtcacctcctcgtgcaagatggcggccgacgtgcaggttgcgctggcggtcgatgccgcggccgtcgatgcctataacgccctgcacggcacggactaccggatgctgcccgccggcagctaccggctctccgacgacgcagtaaccatcgccgaaggcaccaacgtctcgacgccctcctcgttcgaaatcgtctccatggacgatttcgacgaaggcgcacactactgcgtaccgctgaagatcacgggcacctcgaacggcatgggcgttctggaagcgtcgagaacgcagtatatcttcatcagccagatcaccaccacgcgcggcatcaacctgaagaacagctggtatataaccatggacggcatggtggacgatcccgcgctgaaagatctgccggcctgcacgatggaaatccgcatgtatgccaacggctggagaacttcgggacatatgatctcgtcgctgatcggcgtcgaggagaacttcctgctgcgcgtcggcgacgagagcatcaagaatcccgcgcagttgcagctcgccggacgaggaacgtcgatcacggctccgaacgccctgagtctgggacgctggtaccacatcgccgtggtggacaacggctccgaaatgacgatctacatcgacggcaacgccgaaatcagcgtagactcgtcaagcagcaaggccatcaatctcggattctactacaacagtccgttcgccatcggcatgtccgccgccgacgtccgttacttcaacggttacgtcagcgaggcgcgggtgtggaaacgcgccctgacgcccaccgaactcaagaacaaccagtgctacgtcgatccggccaccgccgaagggcttatcggctactggcgtctggatcaggtcgaagacgacggtaggacgtttaccgacctctccggcaacggataccacggcaaggcttcgtcgaatcccatctggaccggcgaaatcaagtgccccgtcgtagactaacctaaacagctaacgaatcaacgggtcgggcggccgccggaaaagcggccgcccgcaacccttaaaaaacaggaaatccatgcgcatcctcaaggcgatggctctcatcgcgacaatactggctccgcaggtggctcctgccgccaatccgcgcctgctgcgcttcgaagagccggtgaagaatctgggaaaggtagccgaaacggacggaacggtacaactgcgcttcgaatacacgaacatcgccgacaaggaggtgacgctgctcgacgtgcatacccaatgcggctgtgcgcaacccgcattcagccgcaagccggtaaagccgggcgacaaaggaatcgtcgaagtgactttcgaccccaaagaccgatacggggatttttccatcgggctgacggtcatcgcgggcaacggcaattaccggaaattcaacacgctggtcgtcaagggctacgtaatcagccggattcccgaagccgaaatcaggtatccctatgcactctccgcggcgctgcgcgccgacaacagggcgatcggcatgcggcagctgagccgcagcgaccccaaacgcacacggcagctccggctgctgaacacttccgcgaaaaccttgcggctggcttaccggactgacagcggacacctcgccctgtcgggtcccggcgaaatcgcccccggcaaggaagcggtgctggaattcacgctcgatccccgaaacatgccggacggacaattcgtcctgaaatgcaccgtcagcacgcaggacgaagagatcccggtagaggtcaagggacagatcgtcggccggtagacggcaataaaaaacataacagcgcgaccgtgctcacggcacggactgcggccgtatgccgcctgacccgcgaaggccggcgcggctgcgtccgccgcatccgctgtataacgacacgaattatgaaacgcatcatctttctcccggcaatcgccgcgctgctctgcggcgcatgcagttccgccgtgccggaggattacacgcaatacgtcgatccctacatcggcacgggcgaccacggacacgtcttcatgggcgccaacgtcccgttcggattcgtacagctcggtccgacgagcatcccgcagacatgggactggtgctccggctacaattacgccgacacgaccgtcatcgggttcggtcacacgcacctgagcggcacgggcatcggcgacctgaacgacatctcgctgatgccggtcgtcggcaaagtcacgccgggacgcggcacggccggcgatccgtcgtcgggcatgtggtcccgtttcagccgcgccgacgaacggtgcgcgccgggctactatgccactcgcctgctgcgctacggcatcggcgtcgagctgaccgcctcgccgcgcgtcggaatgagccgctacgccttccccgcatcggacgacgcgggtatcgtcctcgacctcgaaaacgggcagggctgggaccgctccaccgactgcggcatcaccgcatgcagcgaccgtacggtcgagggctggcgatattcgacgggctgggccgacgaccagcgcgtctacttccacgccgaattctcgaagcccttcgaacggatcgtcttcaccggcgcggatacgctctccgccgacggccgctcggcccgcgggcggaaactctacggacgcttcggttttcggacggaggagaacgaacgcatcaccgtcaaggtcgggctttcggccgtttccgcggaaaatgcccggcggaacatgcaggcggagtgccccggctgggatttcgaagccgtgcgcgaagccacccgcagggcatggaacggcgagttgtcgaaaatccgcatcgaaacagccgatccggcggtgcgacggatcttctacacagcgctttaccacaccatgatcgcgccgtcgctcttctgcgacgtgaacggcgactaccgcggcgccgacggagcggtccgccgcgacacgaccttcaccaattacaccaccttctcgctttgggacacctaccgcgcggcgcatcccctgctgacgctcatccatcccgaaaaggtcggcgacctgatcaatacgatgctgcgcatccacgaacagcagggcaaacttcccgtctggcacctgatgggctgcgaaaccgactgcatggtcggcaatccggccatccccgtggtggccgacgccctgctgaaaggattcggcggcttcgaccgggcgaaagcctacgaagcgatgaagagttcggccatgcgcgacgaccggaggctggacctctacaagaggtacggatatattccctatgagttcaacgaatcggtcggatactgtctcgaatacgccatcgcggactgggcactggcgcaggccgcgcagcgcgaaggcagacgggaggattacgactatttcctcgcccgcagcaaggcctaccgccattatttcgacccctcgaccgggtttatccgcggcagatcggcgtcgggcgcatggcgcacgcctttcgatccgttccactcgcgccacatggagcaggactacaccgaaggcaacgcatggcagtacacatggctcgtgccgcacgacatcgaaggactcatggagtgcttcggcggccgggaacgcttcgtcgggaagctcgactcgctgttcctcgccgaaggcgacatgggcgcgcacgcttcgcccgacatatcggggctgatcggccagtacgcccacggcaacgagccgagccaccacataacctatatctacacgatgatcgggcaaccgtggaaatgcgccgagaaggtgcgccgcatcctcggcgaactctaccacgaccgtccggaaggactctgcggcaacgaggacgtcgggcagatgtcggcatggtacgtactctcggcgctgggcatgtatcagacggagccggccggcggacgctatttcttcggctcgcccgccgtagacggcgcgacgctgcgggtccgcggcggggaattccgcatcacggctgcggacaattcgccggagaacatctacatacagcgcattacgctcaacggcgaagcgtaccgaaaatattacatcgattacgcggagatcaccgcaggcggggaactccgcttcgaaatgggtcccgaacccgcagactggacaaaacagcaacccctatgaaacgacttttactgctgacggcgtgcgcggccgccgcggcatgcagcgccgactggcgcgacacaagccttccgccgcagaaacgggccgaactgctgacggccgagatgacgctcgacgagaagatcggacagctgacgtcgccttacggctgggagatgtacgaacggcacggcgactcggtccgtctgaccgacgctttccgcgaagcggtgcaaaacggacatatcggcatgttgtggggtacgttccgcgccgatccatggacgcagaaagacctgcggacggggctgcccccgcagctggcggcgcggctggccaaccgaatgcagcgctacgccgtgcagcactcgcggctgggcattcccctcttcctcgctgaggaagccccccacggccacatggccatcggggccacgacattccccacggcgccgggacaggcttcgacatggaacccggagctgatcgaacgcatgggcaaggtcatcgccgccgaaatccgcctgcagggcggacatatctgttacggtcccgtgctggacatcgtccgcgacccgcgctggtcgcgcaccgaagagagctacggcgaggactgttacctgacggcgcgcatcggtgaagcctatgtccgcggcacgggttccggcgacctctcacagtcgcggcacgccctctcgacactcaagcacttcatcgcctacggcgcatcggagggcggccagaacggcggaagcaacctgctgggcgaacgcgaactgcgcgagacctacctgccgccgttcgaagcagccgtaaaggccggagcgcgctcggtgatgacggcctacaactcggtagacggcattccctgcacggccaaccgccgcatgctgaccgacatcctgcgcggcgaatggggcttcgacggcttcgtggtctccgacctgctgagcatcgaagggctgcacgagacgcacggcgtggccggaagcgtccgggaagccgccgtgcaggcattgcgggcgggcgtggacgcagacctgaagggcggcgccttcgcctcactccgcgaggccgcggaagcgggcgacgtcgccgaagcggagatcgaccgggccgtggagcgcgtgctggccctgaagttcgaaatgggactgttcgagaacccctatatcgacgaagctgccgccgcggaggtcggatgcgccgcccactcggagctggcgctcgaagcggcccggcagtcggtgacgctgctcgaaaaccgcagcggcaccctgccgctcgatccccggcgcctgcggcgggtagccgtcatcggtcccaacgccgacaacatctacaaccagttaggggattatacggcccagcagacagcggcgaacaccgtccgggacgggctggaaaaactgctggggcgcgaccgcgtcgtctacagccgcggctgtacggtgcgcggcggcgatcggtcggaaatcgcggcggccgtctccgcggcccgcggcacagatgcggcggtcgtggtcatcggcggatcgagcgcccgcgacttcgacacggaattcctgcaaacgggcgcggccaaagccgcgcacgacgaggtgcgcgacatggagtgcggcgaaggtttcgaccgagcgacgctcgcgctgctcggagaacaggaagagctgctgcggcgcataaaggcgacgggaacgccgcttatcgtggtctgcatcgcaggccgtccgctcgacctgcgcagggcctccgaacaggccgacgccctgctgatggcgtggtatccgggcgcacggggcggcgacgccgtcgccgagacgatcttgggccacaacaaccccgcgggccgtctgcccatcaccattccccgcgccgaagggcaaattcccgtctactacaacaaaaaacggcctgcgaaccacgactacaccgatctcacggccgcgccgctctatccgttcggttacgggctgagttactcgacattcgaatacggcagcctcgaagcgcggcagagcggcgacaacgttctcgaagtcagctgccgcatacgcaacacctcggaccgcgaaggcgacgaagtcgtacagctctacatctcggacatggtcgcctcgacggtacgcccacccagacagctcggcggcttccggcgcatccggctcgcaccgggcgaacagcggcaggtaagctttacgctcggagacgaagcgctatcgcttatcgacccgcagggccgccgcgtggtggaaaagggcgacttcgtcatcgccgtcggctcgtcgtcgcaagatatccgcctgcaaacaaccgtcacactcgaataacgtcatgaaacactttgcatacctgcttccggtctgctgcctgctcttcgcggcctgccggaaagactcccccgccaccgaaatcatcccgacgccccgctccgtaaaggccggacagggaacgttcgacctcggcggcggcatccgcatcgccccggccgacccgctgctccgcccggcggccgactacctcgcacaactgctccgggaggaagacgtcgcggcggctcaggacgccgggaacgccaatctttcgctcgaactcgatccccggctgccgcagcagggctacaccctgaaaatcaccccggcgcggatcgaactgcgcggcggctcctgcgagggcgtcgtttcggcagcggcatcactgcgccagctcctgtggagcggaaagggatcgctgccggcactcgaaatcgacgacgccccgcgcttcgcatggcgcggcttcatgctcgacgtcgcgcgccacttcttcaccaaggaggaggtcatgtcgctgacggaccggctggcctgctacaagttcaaccgcctgcacctgcacctgaccgacgaccaagggtggcggatcgaaatcaaacgctacccgctcctgacccggcgcggggcatggcgcactccgaacaaacacgacagcgtctgcctgcggcgcgcggccgacgagcgcgacccgaaatttctcctcccggcaaaaaacatacgccgcgaacagggcgaaatccgctacggaggttactacacgcaggacgacatccgcgagatagtcgcttacgcggcacaacgcggcatcgaggtcattcccgaaatcgacctgccggggcactcgctggcggccatcggctgttatccgcagctggcgtgcgacggccgcggcgggtggggcaaacacttttcgacaccgctctgcatcggccgcgacagcacgatcgccttctgcaaaaacgtgctgacagagctgttcgatctctttccgtcgcaatacgtacatatcggaggcgacgaagtggagcgcacgccgtgggagacgtgcccggactgccagcggcgcatccgggccgagaagctggaaggcgcaggcgaactgcaggcatggttcatccgtaaaacggagcagtttctggcggcacacggcaaaacgctgctcggctgggacgagatcaccgaagacgggctgaccccgcagagcgcggtgatgtggtggcgcagctggatgccctccaccctgaccgcggcgctccagaacggacaccgcgtcattgagtcgccttcggaatttctctacctcaacggcgaactcgaccgcaacacgctcagcaaggtttacggctgggaaccccttccggaatccctgcgggcatggcaagagggcctgctcggcattcaggccaacatgtggaccgaggatgtcccgacggccgacgcggcgggcgagcggctcttcccgcggctgctggccgtggccgagacggcatggagcgctccggaaaagcgggacttcgccgatttccggcgccgtctccccctgcacctgcgtcagctggaacgcgcaggctggaactaccggctcgacgacgtcgagggcgtctgcgacgacaacgtctttatcggcgccgctacggtacgtctgctgccgcccgaatcggccgaactgtactacacgctcgacggaacggttcccgacaccgcgtcgcaacgctacaccgcgccgttcagcatcaccgacagctgcacgctcacgctgcgctgctacaaccgacgcggcgtcgcggcagagattcgccgggcctcgttccgccccatgcgctacgccgaaccgagcgccgatgccgggaacctgcaaaacggactgttggtgcgctggtacgattacgacggcgacaactgcgcggacatcgacgaagcgcccctgcaggcgaatttcatcaccgacagcgtcgttattcccgacggcgtgacgggcaacatcggattgatctgcgacggctatatcgacattccggccgacggcatctattcgttttacacctattccgacgacggaagcacgcttgccatcgacgggcgaacggtcgtcgacaacgacggcctgcactcccgcaccgaacgcagcggacaggccgccctgcggcgcggcgtgcactccttctcgctgcgctacttcgacaccaacggcggcatactggaggccggaatcatcgactccgaaggccggcgcatcccgttttcgagccggatgctgaaacactgagacaaaaccgcttcccgaaaccgcacgcacggacacgctccctaacggccgcaaagggcaaacgatccgcacggcaggcagtcccgcagagacggctgcttaccctccggaaaatacaattcacccgcgctgcaatgtgttgcagcgcgggtgaaatcatatagtcaggactcggctaacagcccctcggtaatccagaaccggactcagtcatctttttcgccggacttcgagccgttcgcagacttcccgcgctcctcgcgggccttcatcacctccttgcgggattcgaatttctcgcggcccgacaacacgcgctcctcgtagcggcgctgctggaatcggccgacccagtcgggcgcaagcacgatcgccacatagaatccggcctgcatcatgcaatagaatgcgatctgaagccacaaactgccgtcaagcataccgtcgagcagccaatggccgggcagcggaaagaagcagaacagcaccagcagcagggccgtgtccagccgctcgctgcgcgaccagcccagacgccgccaatagatgaggatgaagagcaggttgaggcacagcatccaagtgaccagcatgcgcggcgaaagcgccgccgtttcgggcctgaacagcacggtccaaagccccggcactacaggaagcagcacctgcatgcacaacaatagaattttccgacgtttggttttcataggcgcacaaaaatcggcaggtctccgcctgcacgaaaagacacccttaaatatatgaaaaaatacggaacggcacaaacattcggctttttttctgcaaactgcggcggcaggaagctccgacaaccggacgggaacaaccgaagccgggcgggggcaacagagccggggcgggacaactgaagtcgaggaagggcaaccgaagccggggcaggaacaaccagagccgaacaggaacaaccaaacgggaacaaccggaaaccgcgcaggaacaaccgaagccgggcgggaacaaccgaagccgggcgggaacaaccgaagccgggcgggaatagccggcaaccgggcggaaacaacaggagccgaacaggaacaaccaaccgggaacaaccaaccgggaacaccagaacatacggaaccgatgaaaacacaagtcccggcgaccgaaaggccgccgggaccatagaatgtccgtaaaggtttaagtcactgaatcccggacattgcccgtgcgttgcacgcacgggaggataattccggaatacggagcgccggacgccgccgaagcctatcccagcttcatcacgtcgtcgatacccatatccttataagtggtcgcaagctcctcgctgcggtccgaaatgaccagcagtttgtcgcccagcagcagttcggtcttgccctgcggcacgaaatactcgccgttgcggcagaccatcatcaccagcgtattttccggcagcgtgatgtccttgagcatgtgcccgctttcgagcatcgtctcattgacctccacttccgtaagggccgacttcatatcctgatgcatatcgacgctgaaggccgattcgcgctcttcgtaagccagccccagcaggttggccataccgctcacggtggtgccctgcaccagcagcgaaatgatcgtgccgaggaatacgacgttgaacagcagtcccgcgttctccacatgcgccatcaggggatagatggcgaagagaatcggcacggcgccgcgcagtcccacccacgacacgtagagccgcgccttggtggtgaatttgcggaacggggccatgcagatgaagaccgtcagcgggcgcgccaccagaatcatgaacgcccccaccagtccgcccagaatcagcacacggggttcgagcagttcgtcgctgttgacgaacagacccagcgtgaggaacatcacgatctgcatgagccacgtaaaaccgtcgaagaagaccgtcagcggacgtttctgctgcaacttgtagtttccgacgaccagacccgaaaggtagacggccagatagccgttgcccttgatcaggtcggtgaaggcgaacgagaaaaagatgaacgccagcagcagcaccgagtagagcgaatggttggcgaggttgatgcggttgatcgtccaaacggccagacggccgatcaggtaccccgacagggcgccgacgatcatctgcacgacgaagaacaccacgctcatgcccatccccacgctgccagaactgtgcgacaccacgctgatgagcagaatggtcatcatataggccatcgggtcgttcgagccgctctccagctccagcaggggccgcaggttctgcttcaacccctgcttcttgcttcgcaggatcgagaaaaccgacgccgagtcggtcgaggacatcgtggaggcgagcagcagcgccagtacgaacggcatctcgacacccagccacggagccaccagccacacgaacgaggccagtatgaacgccgtcatgaccacccccgccgtggccagcacgacgccgggtccgatgatgggttttatctccgagaacttcgtgtccatacctcccgtgaagaggatgatgcacaaagcgatcataccgacgaactgggtcatctcgaccgaacggaacgagatgaaattcaagccgaacaacatgccgactccgaggaacagcaacaatgcgggggcgccgaaacgatacgcgaccttacccgctatcaccgccacgaagagcagcaacgcacctaccaatactacattttcaccactgatgtctatcattccttaatctttttctttcaggcctgcgctttgccgacagccttcggttgcgttttgtccgcgatcttcagctccgtcagcggcttgtactccaaatccgcatattcgaaagcctgcatggcggcgaagcggttgccgggcgtgcggtagagggccaccgtcagcgccggaacctgcgcacgtttcatgccgagcagacgctccgcatctccgtccgagacggcctgcatcacgtcgctgcggatgccgcggtcgaaatagagctcctcgtagagcaggaaacaacgctcctcccggtggaaaggcgctccgcccgaaccgaacatctgggccgcggccataatcatgcctgcgacgaccataatcccgccgatgaacacgatcgacgaacgcaggttgttcgtgagatcggcgccatacatgttattcactacgatcagcgctgcaccggcgacaaacagcacggcgggcagcagttggaacttacggcgttttaccacaacatttcccgacaaggcgtacaatgcctcgcagattttattcttatccatatccttttcattatctaacgtcagtattttttcagagaaaccggcaaaaatacgtaggctaaataatgagccggcgcagacggtagacataataatccaccgcatgcagaccgacggaaaggtcagaagatttgaattcagaggttactttcgtgcttcccctcgcatgccggtccgcggcatagcggtcggcggccggaccggattcggcatggccgccgcgctggaagaccggagcggccggagctggcgatacctccccaagcacgcggggcaggttcaggtcggcgttgtattcgcgctcgcaaagccacacggcgtcggaggcgcgatcgaccgaaagcgtgacggagacatgccctgcgtcatgcgcaagcgtccgaccgccgcccccgcaaaagagcagacagccgaaaaggcccagcagtatgacgagaattttacgcatctccgattcggtcggcggcaggaacagagacagcgcaggccgcatgcaggccgcatcggatcgccgcaggcgaaaccgctctgtccgagccggaatttacttcggcaaagttaacaatttccgcggaatatcccactccggccgggcaaaaagaacttattgcgggataaaaatgtacgtaatcgtcccctgctggcgcgcaggggccgactggtcgatattgaagcgcgaaacccgtgccgcacgcagggccgattcgcgcatgcactcgtcgccgccgctctgcacacgggcgttgaccacctcgcccgcacggttgaccgtgatttcgacaaccacgtcgcccccgccctcgcagcggtaggccgggatattgaggctgcgcgaggtgcgcaccggatcggtcagcgaaaaggagaccgtcacgcggcccttgaccttgcggtcctgacgctcctcgtcctttcccgcgccgttgcgctcgcggatggcccgctcttcggccagcccctgctcgtaggcttcgcggttggcctgcatgcgccgctcggcttcggccgcggcgtcgttcagcgccgcggcgttggtgccgcggtcgtcgcggagtttctcattcagggcgttttcgttggagacctgattctgaacgcttttccagtctatcgggtcctgctgctgccgctcgcggacctgctgttcgagccggtcgcgctccttctccagttcggccagcgtctgcaggtcgataaacattccctgcgtgtggggcctgcggccgacgacgatcttcgacgaaacgaaggcgatcatcagcacaagataggctataatggtcacgcacaagccgatgcggtggtcgtaggcccacacgccggcatcctctttgcggttgtcgaacggcaatttgagacgcggacggcgcaccgtcttgggtttattgtcgggtatattctcggccatcggaggttgtcataattttgagcaaaaatagcgttttttaacgattttttcatatctttgggcgcaaatattcagaaacactgcttatgtcgacaaaacaacaaacgctgaaggccccgatctctttctccggcaagggcctccatacgggtgtcaaagtgaccatgaccgtgaaccccgccgatgcggacaccggaatcgtattccgccgcacggacatcgagggtcaacccataattcccgccttgtgcgacaacgtcgtagacacttcgcgcggtacgaccatcgaatccggcggtcaccgcgtaagcacgatcgaacacatcatgtcggcgctctggacgctgggcgtggacaacgccgtaatcgacatcgacgcgggcgaaaccccgatcatggacggttcggcctgcgcctatgccaaggccatcaccgaagtcggcatcaccgaccagcaggccgagcgcaagttctaccacgtgaccgaaaagatggtctacacgatccccgaaaagggcgtggcgatcatcctctaccccgacgacgaattctccgtctcgctgcacgtggactacaactcgaaggtgatcggcaaccaatacgccaccttcaaccccggcgacaacttcgccgacaaaatcgccccgtgccgcacgttcgtcttcctgcacgagctggaaccgctgatgaagatgaacctcatcaagggcggcgatctggacaacgccatcgtcgtggtcgagaaccccgttccggacgagcagctggagcacctcaagaagatcttcaacaagcccgacatcgagatcaacgcaggctacctgaacaacctcgaactgcgctgcaacaacgagctggcgcgccacaagctgctcgacctgctgggcgacttcgcactgctgggcgtacgcatcaagggccgcgtctgggcaacccgccccggccattacgccaacacggagttcatgaagcagctcaagcacaccatccgcaaggccggcgagaagccccgctaccagtacgactgccgcaagccgcccctctacgacatcaacgacatccgccacctgctgccccaccgcccgccgttcctgctggtggaccgcattttccaccgcgacgccaccgacgtggccggcatcaagaacgtcacgatgaacgagccgttcttcgtgggacacttccccgacgaacccgtcatgccgggcgtgctgatcgtcgaagccatggcgcagtgcagcggcattctggtgctgggcgacgtgcccgatcccgaaaactactcgacctacttcatgaagatcgacggggtcaaattcaagcgcaaagtcgttccgggcgacacgcttcagttcgaaatccacctgctggaacccatccgccgcggcgtggccgtcgtggaggccaaagccttcgtgggcgaaacgctcgcatgcgaggccgtcctgatggcgcaggtcgtaaaaaataaaaagtaaaggagatgatcagcaagctggcatatgttcatcccgacgccaaaatcgggaacaacgtcacggtcgagcccttcgcctgcatcgcgggcgacgtggttatcggcgacgactgctgggtaggtcccggcgcggtgattcacgacggcgcccgcatcggcaaggggtgcaagatccataccgccgcatcggtctcctgcctgccgcaggacctgaaattcgcaggcgaagtgaccacggccgagatcggcgactacaacgacatccgcgaatacgtgaccatcagccgcggcaccgcatcgacgggcacgacccgcatcggcaaccgcaacctgctgatggcctacgtccatgtgggccacgactgcgtcgtcggctacaactgcgtgatcgccaaccgcgtatcgctcgccggcgaagtgcatgtcggcaactgggtggtgatcggcggccatgcggccgtacaccagtggacgcatatcggcgaccacgtcatgattcagggcggcgcgctgctgggacaggacgtcccgccgttcatcatcgtgcgcaacgacacgatgcgcttcgcgggcatcaacaagatcgggctttcgcgccgcggcttcacgcccgaacgcatcgccgagattcacgacgcctgccgcatcctcttccagagcggactgaactacatgtcgggctgcgaagaggtcgaaaagcagatcccgcaaagcgccgagcgcgacgaactggtgaaattcatccgcgaatcgaagcgcggaatcatcaaaccctatgaatccaaggccaaagaggagtaaaaatttcgtataaatattggtatatcggaatttttcattatatttgcagtgtcgaaagacaaagcgaagcggtaaggggacggtaagtccccttattttataccatatacgaccgaatttcagaaacatgatcgacacgaaaaagataatcgaagcggctgaacgcaaacttcagggcacggatatgttcgtcgtgggctgcacctgcacgcccggcaacgagatcgaactgctgatcgacagcgacacgtcggtagccatcgaagcgtgcgcggagctgagccgggccgtcgaagcggaattcgaccgcgacgaagaggatttttcgctcacggtagcctccgcaggcatcggttcggagctgaaaagcctgcggcaataccgcaagctgatcggcggcacggtcgaggtgctgctcaattcagggatcaagatgctcgcaaaactcgatgctgccgacgacgagggcatcacgatctcgtacgaggagaagcaggccgtcgaaggcaagaaacgcaagcagctggtgaccgtcacgcgccgctatgcgttcgacgaaatcaagtccacgaaggagtggctggatttcaaataggccgccgtccggcaacgcagacagcaaacacaggcttagaaggcagaccgggagcaggacaaaaaccggaagcaggacgcagatgagaggcaaacgcagctgaggggcggtacgcaggcttggagcggccctcagacaagaagcagcccccggagcgggacgctatccggcatgcagacgaaaaaaagccgcggggtacagaagcataaactaaaaacaagataaacgacacaatggacaatctcaatcttatcagcaactttgccgagttcaaagagctgaaaaacattgacaaaagtacgatgatcggcgtgctggaggacgttttccgccacgcactgcaaaaacagtatgagacggacgagaatttcgacgtcatcatcaaccccgaaaagggcgacctcgaaatctggcgcaaccgcaccgtcgtcgaagacggcgcggtcgaagatccgaatgcgcagatcgccgtctcggaggtcaaggccatcgacccgacctacgagatcggcgacgaatacgccgacgagatcaaactctcgtcgttcggccgccgcgccgtgttgtcgctgcgccagaacctcgcctcgcgcattctcgatctggagaaggccagcctttacgagaagtattcggaaaaggtcggcgaaatcgtcaccggcgaagtttatcaggtatggaaaaaagaggtgctgattctcgacgacgaagagaacgagctgattctgcccaaggcggagcagattcccaacgacttctaccgcaagggcgacaccatcaaggccatcgtcaagtcggtcgagatgaacaacaaccagccccgcatcattctttcgcgcacggccaaccagttcctcgaacgcctgttcgagcaggaggttcccgaaatcttcgacggactgatcaccatcaagaagatcgtccgcatccccggcgaacgcgccaaggtcgccgtggagtcgtacgacgagcgtatcgacccggtaggcgcatgcgtcggcatgaagggttcgcgcatctattcgatcgtcaaggagctgcgcaacgagaacatcgacgtagtgaactacacggccaacccgtcgctgatgatccagcgcgcgctgaatcccgccaagatttcgagcatcaccatcgacgaggagaagatgaccgcttcggtctacctcaaacccgatcaggtgtcgctggccatcggcaagggaggtctgaacatccgtctctcgaagatgctgacgggttacgacatcgacgtataccgcgaagtggaggaagaggacgtggccctcaccgaattcgccgacgagatcgacggctggatcatcgacgccctgaagagcgtcggctgtgacagcgccaagagcgtgctggagctgcccgtagaggagatcgcggcccgtgccgacctcgaactggagcaggcccagaaggtcgtagcgatactgaaggcggaattcgaagagtaatcacaagcgaaagaaaggaaaacacacgatatgggtaacgaaagaaaattaaggctcattcaggttgcaaaggagttcaaggtgggactgaataccatcacggacttcctgcagaagaagggtatcaagagcgacggatcgcccaacacgctggtcgattcggagacttatgccgttctggagaaggagttcggggcgaaccgcgccgcaggcaacgcacgcgattcgatccgtgagcgcatctccctgaagcagacgaccatcactctcgaagaagctaaaaagcaggagcgcgaggaggaaaaagaggtggtcatcaaaagcaacgtaatcagcgtcaaggatgaaatccagcagccgaagatcctcggcaagatcgacctgtcgcccaaacccaaggcggctccgacccccgctcccgccccgaaggcggaaccggtgaaaccggccgaacagccccgtgcggcccagcccgcacccgccagtgcgcccgtcgaagcgccgaaacccgcggcgaagcccgaacccgccgcagagaaaccggcagctcccgaagtcaagacggcacctgcggctcccgcagcaccggctgcggccgcggcgactgcggcgcagaccgaaaccggaaaaccggctcccgcggcggcccccgctccggccgcaactccggcaacgactctggctgcggcaccagctgcggctgcagcaccggcacccaagcccgaacccgcagcgccgaaagacaatatcttccgccccgaaaccgtgaccctgacgggtccgcaggtgctcggcacgatggacgtgtcgggattcgtcgccggcggcaagcataaacgcaaacgtctccagaaagagaaggtggacgtgagcaaggccccgaaaggcaacacgccgggcggcaaccgtcagggcggcaatcagggcggacagggaagccagaaccgtcccggaggtccgggccagaaccagcccagaccgggcgaaggccgccgcaacaagaacaagggcaaggcggctcccaagccgatcgtacgccccgaagtgagcgacgaggaggtttcgaagcaggtaaaggacacccttgcccgtctgacggccaagggcgccaagagcaagagtgcaaaataccgcaaggacaagcgcgacgccgtagccgagcgtatgaacgaggagttcgaacgcgaggaaatggaacgttcgacgctcaaagtcaccgaattcgtgaccgtgagcgagttggcgacgatgatgaacgtcacgccgactcaggtcatcacggcctgcatgaatctgggactgatggtgtcgatcaaccagcgtctcgacgccgaagcgctcgtggtcgtagccgaggagttcggctacaaggtcgaattcgtctcggtggagattcaggaggcgatcaacgacgacaacgaagacaaggaggaggacctcgtgccgcgtccgccgatcgtgaccgtcatgggccacgtggaccacggcaagacctcgctactggacaatatccgcaagaccaacgtcatcgagggcgaggccggcggcatcacccagcatatcggcgcctacagcgtcgagctgaacggccagaagatcacgttcctcgacacgccgggccacgaagcctttacggccatgcgtgcccgcggcgccgccgtcaccgacgttgcgatcatcatcgtggcggccgatgacagcgtcatgccgcagaccgtcgaggccatcaaccatgcgcaggccgcaggcgtgccgatggttttcgccatcaacaagatcgacaaacccaacgccaaccccgaccacatcaaggaacagctctcgcagatgaactatctggtcgagtcgtggggcggtaaatatcaggatcaggaggtttcggccaagaagggcatgaacctcgacaaactgctcgaaaaggtgctgctcgaagccgagatgctcgacctgaaggccaaccccaacaagaaggcgcagggcaccgtcatcgaatcgacgctcgacaagggccgcggatacgtctcgacgatcctcgtacagagcggtacgctccacgtgggcgacgtgatcctctccggaacctacacgggccgcgtgaaggccatgttcaacgaaaacggcaagaaagtggagtccgcaggcccctcgacaccggttcaggtgctgggtctgaacggcgccccgcaggccggcgatacgttcaatgtcatggaggacgaccgttcggcgcgcgaaatcgccaacaagcgcgagcagctgcaacgcatgcagggcatcatgacccagaagcacgtgacgctcgacgagatcggacgccgcatcgccatcggctcgttcaaggagctgaacatcatcgtcaagggcgacgtggacggctcgatcgaggccatgtcgggttcgctcatcaagctctcgaaagagaccgtgcaggtcaacgtcatccacgccgccgtgggtcagatttcggaatcggacgtgctgctggccgccgcttcgaacgccatcatcgtcggcttccaagtacgtccgtcggcttcggcgcgcaagctggccgagaaggaggagatcgaaatccgtctctactcgatcatctacgacgccatcaacgacatcaaggacgctatcgagggcatgctcgaaccggtcatgaaggaggagatcgtcgcttcggtcgaagtgctggagatcttcaaaatctcgaaggtcggcaccgtcgccggatgcgtcgtccgcgaaggcaggctccagcgcaacaccccgatccgcgtcatccgcgacggtatcgtcatctacacgggcaagctcggctcgctcaaacgtttcaaggacgacgtcaaggaggtcaccaacggtcaggactgcggtctgaacatcgaatcgttcaacgacatccgcgtcggcgacatcgtcgagggatacgaacaggtagaagtgaaacgcaaatagctacgctatgctgccgaaacgtctgattgttttgctgatgtcgctctgcaccctgtgcggagcggcatcggccgttcagccccggaccgacctcacgcagaaggagcagaaggcgctgcagaaggctcagaagaagaagatccgtcaggaagcccgccgcttcgagagcctgcgcaacgacgccgtagtgcagttcgcccgcgagcaccagccctcggacatcagcaccccttcgttcgtgaacgacttccggatctcgaacgtcatctgcgccggagacaacatctccggcaccgtcatgctgcatttcgacatcacgccgctttacggcggcttccggctttacatgggcggcgagcgcaacggcacctacgcctttgccaaaggtctcgcctacccttcgtcggaccattacggccgcatctacacgatgcgcagcggccagcccgaacatatcgtggtgacgttctacaacatcgcgccgggcgtggagcggctcgaccgcgtggacgtcagcatgggtctggcgctcaacgcgctgaacatcatttcgatgcgtaacgtgccgatcttctggacctactccgacaaagccatcaaaaactacgtacaggaaaacgcaaacaaggtaccagctaactaaaaccaatacaaacttaaagtaaaaatgactacccagatcaaatttaccactgccgaagaagccgtcaaggttatcaaatcgggcgaccacgtacacctgagttccgtggcttcggctccccagtgccttatcaacgccatgtgcgcgcgcggcgaggccggtgaactgaaggatgtacacatccaccacctgcacaccgaaggcccggcgccctatgccgacgagaaattcgaaggcgtgttccagctcgactcgttcttcgtgggcggcaacgtccgcaaagtgacgcagagcggctacgccgactacattccgattttcctgagcgagacgcagcgtctgtaccgctgcggcgcggttccctgcaacgtggcgatgattcaggtatcgacgcccgacaaacacggcttcgtatcgctcggtacctcggtagacgcgacgctggctgccgtggagaccgccgattacgtgctcgccgtggtgaacaagcacgttccccgcgccttcggacaagccatgatccactcgtcgaagatcgactacttcgtgcaggacgacactccgctgatggaggcgcacttctccgagccgaacgagaccgagacggccatcggcaagcactgcgcagccctgatcgaggacggcgcgacgctgcagatgggcatcggcgccattcccaacgccgtgctggcgcagctgggcggccacaagaacctcggcatccataccgagatgttcgccgacggcgtgcttccgctggtggagagcggcgtaatcaacggcgaagccaagaatatcgacaagggcaagatggtctcgacgttcctgatgggttcgcagcgcgtctacgacttcatcgacgacaacccggccgtattgatgatggacgtgggctacaccaacgatccctacatcatctcgaagaacgaccgcgtgacggccatcaactcggccctgcaggtagacatcacggggcaggtatgcgccgactcgctgggcacgaagttctattcgggcgtcggcggccagatcgacttcgtatacggcgcatcgctctcgaagggcggcaaagccatcatcgccatgccttcggtcaccaacaagggcatttcgaagatcgctcccgtgctcacgccgggcgcaggcgtcgtcacgacccgcaaccacatccactggttcgtaaccgagcacggcgccgtagacctctacggcaagacgctgcaggagcgtgcccgcctgattatctcggtggccgatccttcggctcaggaggagctggaccgcgccgctttcgagcgtttcggccagcaccaccactacgtaaagaactacatgagcaagtaataaattattacgcaatcgagaagcgcccctgttacagcgggcgctttttttgtatctttacgcaaacaaaaacaccccgaaatgaaacgatacgcctgtatactgcttgcactcctgttcgccggatgcgccgcgtcccgcaggagcgccgtcgcaaccgctccgcaggagaaacaatacgccgtcattctttcgatggacgcattccgctgggacctcgcaggccgcagccacacgccgacgctcgattcgctcgcccgcgtcggcacctatgccgaaatctacccagtctatccctcgaacacctttccgagccattacgccatggccacgggcctgcaccccgaccaccacggggtcgtgaacaacggcttctacgaccgcacgcagggacgccggctctcggttttcgactcgctggacgtccgcacgccgggattctggggcggagagccgatctggaatacggcggaacggcaggggcttacggccaacatcttcatgtggccgggcagcgaagtcccgatcggcggccgtcaggcgaccgtctggacccgctactcgtccaaaccggactactaccagcgcgccgactgggtgatcgacgccatgacgcgccccgaagcggagatccctgagctggtgatgtggtacttcgaagaacccgacgccgcgatgcacacctacggccccgaatcgcccgaagccgtgggccgcgccgagcatatcgactcggtgctccgctacttcttccgcgaaatacgccgctcgcccgtcttcgaccgcatcaacttcatcgtcacggccgaccacggcatggccgggctttcgcccgaccgctacatcaacctgctgccgctgctcgacacggcgcaggtcgtgcgtgtcgttccgggcacgccgttcggtctcgaagtcaaggaagagtatgcggaccaagccgtgcgcacactgcgccgcacgggccatatgaaggcatggcggcgcgagcggatgccccgccggttccactacggcacccaccccacgcgcctgacgaacgtcatcgtcattcccgaaacgggctggacgctcgactacgccccgcaggaccgtcccgtgcgcaaacgcggcacgcacggcttcaacaaccgcgaccgggatatgcacatggtattttacggctccggccccgccttccgcaagggctaccgacagcgatcgttccagaaccagaatatgtatcttatcctctgccggctgctgggcatcgaaccggcccccaacgacggggagtggcgcgacataaaacgcatgttcaacgaaaattagaaattatttttctatatttgcatacaagacaaaaaactgatgcctatggagagataattgcacaattttttctgtttaccagatttacacgtgccgatccgcactaaaagcgccggtacatacatataaaaagcgccagcttttattcatacatcttgaaacttaggacacttcaaacggtagttgtgaataaaacggacgctcacgttactgcgtgggctatactgttttatttgactaccaaggtatcctaagaccgcaagatgcaaataaaagtgtagtcccacgttttttatatgtccagcacaatgaaaccgccgagggactggcacttcaataccagcaagaaacatgaaaaaaatttatttctgccttccggcaatcctgacaggcgtcttacagctttcagcacaggacatcatcaccaaatgtaacggcgaagaaatcgcagcgaaagtcgccgaaataggcgacacgcaaatcaagtaccggaaatatgaaaatgcgcagggaccgctctacactctcccggcatcagaagttttccttatccgattcgaagacggaacccgcgaggtcgtaacgccgctggacgccccggcagtctcaccggccacggctgcggaaacgaccgggacggagagcagcacaacagctcctgcggctgcgaatgaaaattacgcacagatcaaccggagcgtaaagaggacgaaggagccgcttcgagacaaacatttctatatcggaccgcgtgccgaattcggatatgcggcaataacgtccaaaagcggaaatatatcgggccccgtctgctcggccggagtgattgccgagtatatgttcgacaaaatgagtccgcacggtgcgggtgcgggaatcagctacgacatgtatatgttcgaagaggattttgacctgaactgcatgaatatagatttgtattacgtctatcggccgcgcggccgctggaattgctttgcagggttcaaattcggaatcccggtcaaatccgaagcgtcaggcgccgacctgaaaacagtgacgaatacggccgtcggtatcgagatgggcgccggatgggccacgcggcatttcgatctcggcgcggcaatcttcatgaacttcaatagtacgcttgatatatccgaaagcaatcggatggtaggtgtcaaactccggatagcatatcgcttttaagccatgaaacagttactgtcattcatcgtatgctgtctgatcggagcaagttcggcagcacaggatatcatcctgaaacgaaatgccgagcagatcgaagccgtcgtgaaagagattaccgacaccgacgtcaaatacaggaaattcacgcataccgagggcgtcacctattccataagacgcagcgaagtgttctcgatcacctatgaaaacggcaccaaggatcttttcgcagatgaaaaaccgcaggctgtcgccgcgagctatccctacccacccgtttcccgcagctattcgctcggagagctgttcgatgagggcggtatccggggcattgtcatccgggtctcagaagatggcaggcacggactgctcctgtcgctcgtggaaggaaaagcagcatggggttttattaacaaaaacccattgaaagaaaaaggctttgcgagcggctgcaccgatatcgaagacggatggaaaaatatgctggccatacgggaattaatcgcaaacacggacttattgtggtcgaacctgcctgcattttcgtggtgcaaggacctcggtccgggctggtatcttccggcacaaaaagaactggagtccatatggaatttcgggagaagtaatccggcttactcgtataaggagcataaagaggccatagaaaacctgaatttacggcttgcggaatacggccagccggaactcggccgtatgcgcgactattggaattcgacggaagcagatgcgaagagggcgcatatattggtctttaccaatgcacccttcaaaagctacacaaaaggaacagagaaattcgccgaacgcttcgtaagggccgttcacaaattctgaacagagagttctgatggggtgagggccaagcggtcctcacccattcttttaaaatcgaataaaaggctttgcgacattcccgctaattacgccatattcgccaaatcgggcagcctagtccctcaacaggccaacaaggaccgcccccatatgccgcccagatacgccccctcaaacagatcggcaggcagagccttgcctgtaacagcggcttcgtcccgccccgaagggtcagcgatcgtttttcagaagctgacagcaaaattacaagcacaaaaaaaggtcagacctttcgatctgaccttgaagaggcggctacctactctcccacgggaaaaccgcagtaccatcggcgtaagtgagcttaacttctctgttcggaatgggaagaggtgggacctcactgctataaccacctaaaagaacgttttcgataagcgagtacaaagagaatttattcactttgtcgagcgaagaaaacgaaggacgaagtccaacgttgcttcaaactcatcgaagccatgcgagtgatacttttagctatcacaatccgtcgcactcggtatgagttgacatattagggaaatgagataaagaaatctgtaagaaagccgttcgggtaattagtactgctcggctttgacattactgtctttacacctgcagcctatcaacgtagtcgtctcctacgcccctcaagggaagacttatcttggggatggcttcgcgcttagatgctttcagcgcttatccaaaccgaacgcggctactcggcggtacacttggcagcataaccgatacaccggaggttcgtccaactcggtcctctcgtactaaagtcaggacccctcaatcttccaacgcccgcaacagatagagaccgaactgtctcacgacgttctgaacccagctcgcgtgccactttaatcggcgaacagccgaacccttgggaccttctccagccccaggatgtgacgagccgacatcgaggtgccaaaccgccgcgtcgatatgagctcttggcggcgatcagcctgttatccccggagtaccttttatcctttgagcgatggccagtccacgcagaaccaccggatcactataccctgctttcgcacctgatcgacttgttggtctcacagtcaagcacccttatgctattgcactctacgcacggttaccattcgtgctgagggtaccttgggaagcctccgttactcttttggaggcgaccaccccagtcaaactacccaccaaacggtgtcccctcttgagggttagaactcaaatacacaaagggcagtatttcaacgttgactccacgaatactggcgtacccgcttcatagtctcctgcctatcctacacattgtgtacccaaattcagcgttaagctatagtaaaggttcacggggtcttttcgtcccgttgcgggtacccggcatcatcaccgggactacaatttcaccgagctcacggttgagacagtgtccagatcgttacaccattcgtgcaggtcggaacttacccgacaaggaatttcgctaccttaggaccgttatagttacggccgccgtttactggggcttcgattcaatgcttctcttgcgatgacatcccctcttaaccttccagcaccgggcaggtgtcaggccctatacgtcttctttcgaatttgcagagccctgtgtttttgataaacagtcgcctggacctcttcgctgcgcccacctcgcggtgggaccccttttcccgaagttacggggttaatttgcctagttccttaaccgtgattcactcgagcaccttaggatactctcctcgaccacctgtgtcggtttacggtacgggtgacatatactataacttagaagattttctcggaagtcgacttgggtgcactatcaaattgcccgtaggctctctgtactgtcggggttcagcaaggactaactcttaatctgtccctatacctacgccctttaaccacctattccgtcaggcggcggcacttacgttccttcgtctctccatcgaggtatatgtcagtatcggaatattaaccgattatccatcgagatcaccgttcggcttacccttaggacccgactaaccctgatccgattagcgttgatcaggaaaccttggtcttgcggtgtgcgggttactctcccgcattatcgttactcatgcctacatttgcttttccatacgctccaccaaatctcacgattcggcttcgacgctgaatggaatgctcccctaccgcactttcgtgcccagaacttcggtggtatacttgatgcccgtttattatccacgctttgtcgctcgactagtgagctgttacgcactctttgaatgaatagctgcttccaagctaacatcctagctgtctctgcaacaaaacatcgttagatcaacttagtatactcttggggaccttagttgctggtctgagttgttcctcttttgtgaccggacattagcacccggtcgctcactgctgtaaatcatactactggcattcggagtttgtcaggatttggtaggcggtgaagcccccgcatccaatcagtagctctacctccagtagactctttattacaacgctgcccctaaaggcatttcggggagtacgagctatttcccagcttgattagcctttcacccctaccctcaagtcatcgagaagcttttcaacgcttattcgttcggtcctccagttggttttacccaaccttcaacctgctcaagggtagatcgcaaggtttcgcgtctacaaccactgactaaacgccctattaagactcgctttcgcttcggctccgtgcatccgtgcacttaacctcgccagtgattagtaactcgtaggctcattattcaataggcacgccgtcacagcacgaagctgctccgacaggttgtaagcgtatggtttcaggttctatttcactcccctgttcggggttcttttcacctttccctcacggtactggttcactatcggtctcttgggagtatttagccttaccgggtggtcccggcagattcagacaggattcctcgtgtcccgccctactcaggatactgctatcgcataacgtgcttacctgtacgagtctttcactctctgcggatgaactttccagaacattccagttgacagtcacttgaatattgcagtcctacaaccccataattgccgtaacaagtatggtttaggcttcttcccgttcgctcgccgctacttaggaaatcgatgtttctttcttttcctcctcctactaagatgtttcagttcagagggttggcccactttcgtgtgctaggccttctgcctagcgggttgtcccattcagaaatcctcggatcaattctcgtttgcaaatccccgaggcttatcgcagcttaccacgtctttcgtcgcctccaagagcctaggcatcccccatacgccctttattactttcttacattcatcataacccctattgtaattatgatgaccttatctcatctccttaattatgtcaatgaacgttgcaaattttcatttgccgagaacagtactcggttcgaacctacgcctaaagcggtactgttataacgtttctttgaagtgagcagctaaatttacctttgaaacaaggctccagaaaggaggtgttccagccgcaccttccggtacggctaccttgttacgacttagccccagtcaccggttttgccctaggtcgctccttgcggtcacgaacttcaggcacccccagcttccatggcttgacgggcggtgtgtacaaggcccgggaacgtattcaccgcgccatggctgatgcgcgattactagcgaatccaacttcacggaggcgggtttcagcctccgatccgaactgagataggctttcgagattggcatcccctcgcggggtagcggccctctgtacctaccattgtaacacgtgtgtagccccggacgtaagggccgtgctgatttgacgtcatccccaccttcctctcggcttacaccggcagtcccgccagagtgcccagcttgacctgatggcaactaacggtaggggttgcgctcgttatgggacttaacccgacacctcacggcacgagctgacgacaaccatgcagcacctagtttcgtgccccgaagggaaatcctgtttccagaatcgtcactaactttcaagcccgggtaaggttcctcgcgtatcatcgaattaaaccacatgttcctccgcttgtgcgggcccccgtcaattcctttgagtttcattcttgcgaacgtactccccaggtggataacttatcgctttcgcttagtcaccgactgtgtatcgccgacaacgagttatcatcgtttactgcgtggactaccagggtatctaatcctgtttgctccccacgctttcgtgcctcaacgtcagatatagtttggtaagctgccttcgcaatcggtgttctgtatgatctctaagcatttcaccgctacaccatacattccgcctaccgcaactactctctagttcaacagtattagaggcagttccggagttgagccccggtatttcacctctaacttatcaaaccgcctacgcaccctttaaacccaataaatccggataacgcttggatcctccgtattaccgcggctgctggcacggagttagccgatccttattcgtactatactttcaggctcctacacgtaagagcgtttaccctagtacaaaagcagtttacaactcatagagccgtcttcctgcacgcggcatggctggttcagacttgcgtccattgaccaatattcctcactgctgcctcccgtaggagtttggtccgtgtctcagtaccaatgtggggggttaacctctcagtccccctatgtatcgttgccttggtgagccgttacctcaccaactagctaatacaacgcatgcccatctttaaccaccggagtttttaacccaagaagatgccttctcgaatgttatggggaattagtaccaatttctcagtgttatgcccctgttaaaggtaggttgcatacgcgttacgcacccgtgcgccggtcgccaccaaagtattgctacctcgtgctgcccctcgacttgcatgtgttaagcctgccgctagcgttcatcctgagccaggatcaaactctccattgtataaataatgttttgttttaaatctttcgctctaatctcaaaggtattgtttgaaatcactctcttgcaagagtggaaaaaacttttagctgctcaaatacttcaaagaacgctgttcgattatattgctataaagaacaaattctctctttttgccgggttttgcctttcggctttccccgttgttctgaccgcgatttttcagcggaaagtggtgcaaagataagtcatattttttgaaccaccaaatctttttgaaagaattttttcagaaattttcagaaccttttcttttatcgtttcgaaccgtatttcttattcgaagcgggtgcaaaggtaagtcatttttctgaatctccaaaagatttcggaacttttttcaaaatttttcagaacctgtttttgtgtttcggagtagtgtttctctctcgaagcgggtgcaaagataagggcatttaatcgctatttccaaatatttcggagactttttttcaacattttcggagccattttcacaccctgctatgcgtcagcgagttagttgtgaaaaatttttaatatatttgtccccacaagagatcggacagaatgaaacgaagcttattatatataggtatacttttttcggctgtttcatgcggccggaacgaccatgcactgcaatcgggcgacctgctctttcaggccggagaaagttcggatatgaccggagcgatcaccgcggcgacgggtgaaaacggacggttgaatttctcgcacgtgggaatcgccgtggtgaaaaacggagcggattcggtactcgaagccacgacgaacggcggggtccggcttacggcactgccggaattcctcgcccggtcggcaaaaatcggcggacgtccggcggtcgtcgccatgcgattgaaggatactgcgggagtttgcgaagcggtcaggcgggcgcaaaattacctcggactcccctacgactactccttccggcccgacaacgggaaattctattgcagtgaactggtctgggaatgttaccggacaagcgacggttcgccgatcttcacggcccgtccgatgaacttccgggcggaagacggcacgctgccgcaattctggaccgagcttttcgcccgccggagcgaatccgtcccggaaggcgttccgggcaccaaccccaacgacatgtcgcaggagagaacgctccgcgaagtataccgctggttctaaacgatccgctcgacggtcacatcgggattctcacgcagcagatcgacatagcgttcttcgtcggcattcccctttgcccggataaccagcgtcgcacggtatacgacgccgtcgggactgcgctgcgcctcgacctcataggagatcacggcgtattcactgctttgcagctcgttgaacatggcgtcgatcgccttgcggtcggcggccgaaaagacgaccatgatccggcggcgccccagcctgccgaaaaagagcgtcagcacctccagcgcaaagagcgtaagcagcgtggccgctccggccacgacatacatatgtcctccggccgcaagtccgattcccgccgtggcccacaaactggccgccgtcgtaagtccccgcaccagctgccggtgaatgatgatcgtgccggcgccgatgaagccgatgccgctcaccacctgcgccgcgatacggctgggatcaagccgcagtccgtcgtgcgtggccaaaaagccctcgaacccatactgcgacacgatcatcatcagggcgctgcccagcgcgaccagaaaatgggtgcggaatcccgcatccttgacccggtactcgcggtcaagtccgatcaccgtgccgcaaaggcccgccacacacaatctcaatatcaaatcccactccatctccatagttccgcggttttattccctatcaaatatagtacaaattatcgggacggacaaaccggatgcctgcgtgcatatgtgccggaacaggcggacggaacgacaggccgacacgaagaagccctccgcacggagcggacaccccttgcgccggaaaacgttttccggtgaaaaagaggagaattttccgtctcaaggttgcagagtgccgaaattttcgtatctttgcaggctatgtttaactaattaactatttacgacaatgccgaaaatgaaaaccaatgccgctgcgaagaagcgttttaccttcaccggcacaggaaagatcaagcgcaaacacgcttatcacagtcacatcctgaccaaaaagacgacgaaacagaaacgcaacctctgctattcgggtaccgtttctgcggctgacgaagccaaaatcaagaacctgctcgtcaagtaatttccgggcggacattttattaatcggagcgaaacagccccaaagaatgcgggagaaccgcatcgctgacagctcttcaaaaactttacagtatgccacgttcagtcaacgttgttgcgtcacgcgcaagaagaaagaaagttttgaaacttgccaaaggtaactttggttcaaggggaaacgtttggaccgttgcgaaaaacacggtcgaaaaaggtctgtgctatgcttatgcacaccgtcaactcaagaagcggacgttccgttcgctgtggatcacgcgtatcaacgccgcagtccgcgcgcagggaatgacctattcgcaatttatcggcaaagtcaacgccaagggcatcgccctcaaccgcaaggttatggccgatctggcgatgaacgagccgaaagcattcgaggcaatagttaaagcagttaaataacctctctgcggaaaggtttatagcggcggatacctcggtatccgccttttttaattccgatatataaccggacgatgcggttttcgataaaatcggcagtaatttccggattttatcgtacatttatacacttatatctaaaacaaaccatatgcgacactttttcctttcgcttgccgccgcgtccgcagcgctgctctgcggtatcggaactgcgcacgccgttcccgccaaaccgggtctcatccaagtaacccagagcgacggcacgcaactcaccgtccgtctcgtcggagacgagcgccgccactacatgctctcctcagacggctacacgctgaccggaggtcccgacggcgacctctactacgccgagctttcggcttcgggaaaactgatcccgacaaaagtcaaggcccgaccggtaaacgcactcaccgccgatgagaaagccgtcgtctcacgactggggaaggagctcaaaccgacctacgtcaaaccgatggtcatgccggcgccgcagcaaacgcaggcccccgtgcttcccgcagccggaaagcccgcccctccgcggcgcatcacttcagcccaaaccacaggccggctcaaatcgctgattatcttggtggagtcctccgacaagaaattcgcctcggcatcggcgcagcaggatttccgcaacctgctcatgcaggacggctacagcgtcaacggcgcgacgggcagcgcatggaattactatcaggacaactccaacagactgttcgatcccgaattcgtcgtggtgggtccctacaaagcctcgaaaacatcggcgtactatgccggaagcgacggcagcgaaaatgtagcggaactgatcgtcgaagcatgccggctggccgataacgacgtcaacttcaccgatttcgccgacaacggagtcatacgcgacgtcttcgtcttctacgccgggcgcggacaggcagactcaggcgatacgcaaagcatctggccgcaccggtgggacgtacgggttaattcgaagtatctagatgtccgattcgacggtgtacaactgcagggatacgcctgcggcgcagagctgaacggcggttaccagatgaccgccatcggcacgttctgccacgaattcggccatgtgctgggctggcccgacttctacgacaccgactactcggcatcgggcggcaccgctccggcgctggagagtttctcgctgatgtgttcgggcagctataacaacaacagccgcacgccgccgtcggtcaacatactggaacgctggatggtcggctgggccgaacccgaagaggtcacggaaaacgggctttacacgcttgctccggtctcggagaacaaaggctatctggtgcagacgccgacgacgaacgactatttcctgctggagaaccgcgacacccggaacaacaagtgggatcagcccctcaacagcgcagcagcgtgccgcggcctgctggtatatcatgtcgattacaccagcagatacgtcccgcagtggtcctacaatacgctcaacaacaatccggcccacgaatgtatgaaactcgtgcggtcggttccgggccggtcgtcctacgacgttccccagaagacgttcttccccggcgcgaacaacatcacatcgctctcgcccgaaaccaacgcggactatatttcatggaacagcggcaaaccttccgtttcgttcagcgatataaaactcgacggttcgcaggtccgactgtcggtcaagaccaaggccaatctcaaggccgaggtcagcgccagacagtacgacgccctgctgacatgggagggcgatccggccgccgagtgggagatcacatggaaatcggcaggcatacagcgttcggagaccgtaacgggatgcaatgccttccacataacgggtctgtcgcccgccaccgaatatgcactctccatcgcacaggtgtccgacacggtggacagcagcaaagacctgatcttcaatacggagccgacctacacctataaaagcgtacgcatctgcgtcccggatgagggatacacgcacgacacgccggtcatgctgagtctgctcgactaccgcggcaagatcggccggatcgactggtacatcgacaaccggaagaccgaaaacacctacacgactctcgcggcaggcgaacacaccatcatggccgtcgtcaccgacgccgaagaggagtcgcagcagtatatcgtcaaatacatcaccgtcaaatagcatccgccatgaaacacctcaaatatcttctgctgatctgtctcgcggccgcagccgcctgctcgaaagacaaaaccgaagacccgacgctcaaggcccagcgcacggcgctgcaggagacccaaaccgtaggaatctaccgcagcggagaagcgctgcggctcttcgacaaggcgaagcagcagctgttcgtcgatccgacgacgcttacgttccgcattcaggacgacgcgggcctgaaatttgtcagtctccagctggagtcgatgccctccgagggacagaaggtccgcggcaccttcaccgacaacacgggactcaacatcggcggcatcgaagatttcgtgctgctcaaatcggacaaacagcactattggttctggtccgatcaaacgcgtgtaggcttcgtcttcccgcgaatcggcatgtaaccgcaaaaacgcagcgtggaaaactggaaaaagacattcgccgtcatctggagcggacagctggcctcgatcctgagcagttcggtcgtcgccttcgccatcatcttctgggtgagcctcgaaacaggctcggcgcaggtgctggcgctggccgccattgccggcatgcttccccagtcgctgctgggtccgctggtcggcgtctatgtggaccgctgggaccgtaaatggacgatgattctggcggacagtttcatcgcgttgtgcaccctgctcctcgccgtacttttctggctcggcgtcgcccgcatgtggcatatctacgtgctgctggcatgccgttccatcgggtcggctttccacacccccgccatgcaggcttcggtgccgctgctcgcgcccaagcagcagctgacgcgcatcgccggcatcaaccagatcatcagttcgctgtcgaacatcatcgggcccgcgttcggcgccctgctgatcaacctgacgggcatcggcaacatcctgctgctggacgtcgcgggggcctttatcgcctgcaccaccctgctgctggtccgcattcccaatcccgaacgcagcacggcgcagacgcccagtctctggcgcgagttccgcgaagggttcggcgccatgcacgccgttccgggcatgggctggtttttcacgctggccgtcctcgtgtggttcttcatcatgcccgtcggcgtgatgtttccgctgatgacgctgcagcacttcggcggaggggcctacgaaatgagcctgatcgagatcgtgtggggcggcggcgcgctgatcggcggcgccgtcatgggcgcccgaacctaccgcgtcaaccgcatcgtgctgataaacctgatgtacctgaccataggactgctgttcgccgcttcgggcatgctgccgcccacggcattcgcgctattcgccgccctttccctgatcgaaggcgtcacgagcagcgtcttcaactcgtcgttcgtctccgtcatccagagccgcatcgacgcgggagtgctggggcgcgtcatgtcgctgtactacagtttcggactgctcccctcggcgatcggactgctcggcacgggcttcctcgccgagcatgtcggcctgacgacgaccttcgtcatcgccggcacggtcatctgcggcatcggactcatcgcattctgcatcccttcggtcatgcggctcgaccgacaatcttcctgacgacggaaatacattacgacaaaaaaagagcgaggccgacaagccccgctctttttcattcggatagaattccctaaaccgtcacgacgtgaccggcataggtgatcgtctgacgaagccgcgtaccttccaaggtgatctccacgatgacatccttcgacggatagagactcggattgtagccgtcgcccagcgacgcttcgatcttgccgccgtagagggccgacgaagagtaatactcgccgttggtcatcctgagactcatcgtcgtcgccgaaatgccgtcataggtgttgaacgtgcggcccgtagccgtgccgttcagcatgaacttcttgccggcgcagtccgtataagtgaaattcacgttctcaggcttcaccgtaaatttgccgttccagtttgaggtcagctcctcggtcttgccgacataggactgctgagcctccagcccgattccgtaagcgcccgacgactcgacgaaatagagtttcgtcagaccgcccgtcagcgtgatggcctgcatgtcgccgcccgaatagcccatcgtcagtttatcctcgaaagtaacggtccacggcttgctttccgtagcatctttcagcagcgccgtctcgttggtgttgatcagcagcgtgcccttgcggacataagtgtcgaggtcggcataatcggcatcgaacgtgatcttgtaaccgttcgccgtagtctcgactttggcattgcccagcaactgccttttcagcagtgtattgctgctgccgaccgtcacttcgtcgatcgttttctgctgtttgtcggcctcggccaccagcatcgcaagccgcaagccgaagttggcctgctgcatcgacacgatattctggttcatggcaccggtgtagatgttaagccccggttgtacgggcttcaatttcttgtaggtgtcgtcttccttcatacacccgctaaaaaccagcgacatagccacggccgctacaaataaaacttttttcatcataagaatttcaatactaaattatgcgatataaacgtacaaattcgaaaaatactgcgccccggcgcaaaaaaatgcacatttattcgattttttgccaatagaccgaacggctgaaccccagcagcgatcctttgacgcgcagcgtccggtcgtcctcgaacgacacctcgaccttttcgaatgcaggccaaaggtacgaatatttcactttttttcactatattgcccttgttatgtacaatatttgaggaatgaacccaaaactcttgttacttatgtccctcctttcactgctcggctgcggaaagaaagcagcgcccgaataccccgccgacacgctgaccacacgcgacggcacgcaaatcacgatcaccttcttccggcacgcctcgctttcgatcgaggtcggcggcaaatacgtctatgtcgatcccgtcagcggctacgcccgatacgcggcgttgccgaaggccgacgtgatcctgatcacccattcgcattacgaccatctggacgttgcggccgtcgaagcgatccagacgccgcaaaccgaaatcctctgcgaccgcacctcggccgaagcgttcgaaatgaactgctacacgatgcggccgggcagcgtcgccgcaccgcgcgactacctcaaggtcgaggccgtagccgcctacaacaccaccgacgggcacctgcaattccaccccaaagaccgcgaggactgcggctatatccttaccgtcggcggcacgcgcatctacatcgcaggcgatacggagcctacgcccgaaatgaaagccctcaagaatatcgacatcgcgttccttccggtcaatcagccctacacgatgaccgtggatcaggccgtcgaagcggtcaaggcgatccgtccggcggtcttctatccctaccactacggcgaggtcgaagagaaaaccgacaccgcccgtctcgcccgcgagctggaaggcgtcaccgaagtccgtatacggccgatggaataggccgcgcaatcacacgaacggctgacaaaaaagggaggaccgcaagtcctcccttttcaataacaaaacccggccgccgctatttcttcgcgtcggctttcttcggctcggccttcaccttgagcgaagcgaagcccttgacgatattctcgtcgttgttcttcgtgccgtcgtataccacggtcacctcttttttcggcagatcgacctgcacgtccttcacgcccttgcccagcgacggaacgttgttcatgatcttcttgacgcagtgctcgcagtcgatgtcggtcgtaaacaccgtcgtcaccgttttcttgttggcaggcttctcggccgcgcacatgccgacacccatcacaagggcgaggcaaagcattaaaatctttttcatcttcgtgttattttaaggtttgaatctcttttttccgcagagcgcatcaatagaggttgaagcgcagacccgcgtaaaacttacgtcccatgagcggtccccagacgttcatcgagttgaatcccgtcgaaaagggattgtccgcattcagaatcgggtcgtgctgacggtagtcggcgatattctcgcagccgacataaatatcgaacttgccgaccttgcggctcacctgcgcgaagaacatcgggtaacggggcgaatatttgtcgtcggccagatctccggtctgcgtcgggatgcgcgcgggaccgttcagctgcgccgtggcgtcgaacacccagcggcggaacttcgtggcatactggatattgagcagcgtcttgtacttgctcaccagcggacgctccacgcgggccgtcgttccgtcgggacggtcgatcgtcatttcactgttcgtatagcggaacgtcgcgaaaatatcgagccgctcgaccggcgtccacgaaaagtcgatctggtaggtatccgtataggagcgtttgtccgagttgtagagaagtatctggtcggcgttatactcctgatccgcgatcaccgagttgtagaactgcgtgcggaaatagtcgaagctcagcgtcgcgtcgtcggcgctcaccagcccgaaggtctgcgtcaggcttccgcccacggtcagggccttttccagccggttgaacttcgagaagtcgctgtctttgaaaacgatcgcgcgacccgtcgccaaaataccgatattgtcagtgatgacattggtcgaacggtaccccagtccggccgagccgcgcaaggtcgtcgaaggggtgatgttccagcggatatggccgcggggcgttacgaaaaacttgtcgtagaaggcgttataatctccgcggataccggccacgatggagaacttatccttgacggcataggtgtactcggcataggcgcccacctcctgctcactgcggtcgaagtcgtagaaacgcgacttcgcggcctcgatccacggcgtgttgttggccagactctcgcggtaatactgcagctgcgcctgcgcgccgacgatcagcgacgaacggtaggtgaagtagtgattatacatcaggttcatcgccagcgcattctcgttgcccttgtagtcgttcagaccgaagtaggcgttttcgttgaaatggtcgaaatcggccacgaacgcgaggttcgaacgcatctcgtccttctcgtcgggatcgtataccgaaggaccgacgggcgtacctattttaaaatagccgttcgcgccgcggttgcggatcttcgatccgtaaagcgtacccggctggtcccatttctcgcgcatctggtcgcgcatcgaattcttatagtcgagcatgccgcccagccggttctcctgcacgaacttccagccccagcgaatctgcgtgccgttgtcggcggcatagagccacttgttggcgatgttgagctggtcggccagcggcaggtcgcggaacccgtcgtcgttgtggtccatcttgcgcacgtcggtgtccatcgaaccgtgcagcaggatcacgctcgacagtttcttgttcttggaaacgggaaacgccgtcgagatattggcttcgggacgcagctcgtcgtcgaggtagagattcacgaacagacgctcgtcgtcggtaggcttgcggtgttcgaggttgatctggcccgtgatggcttcatggccggccgtaaccgaggccacgcctttggatacctgaatcgaattgagccacatgcccggcgtgtagctcaggccgtagggggcgctcaggccgcgcatgatcggacggttctcgtcgagaatctgcgtataggtgcccgcaaggcccagcatcttgatctgacgcgcgcccgaaatggcgtcgctgtaccccacggtcaccgaagccgaattctcgaagctctcggcgaggttgcagcaggccatcttgcagagacccgcgaacgaaatcatctcgttcttgacgatgccgtcgcgcttgacgaagttgccgctgaggttgccctcgaccacgacgtcctccagctccacgccgtccgccctaagtgcgaattcgatccgctccgcgccgttcgcgacgtgcagcgtgtcgttcacgaagcccagatacgaagccaccaaattatcgtaacctttcacgcggtggagcagaaaagctccctcggcgtcggtgctggcgccgatcgtggtaccctcccagtagaccgaagcgcccaccagcggctggttgtcggcatcgcggaccacgccccgcaaatcctgcgcgctgagggtgccgcacacagcgagggctgaaacagataaaactaaaattttgttgattttcattacgttccgttattggttaaaactgattccggacggatgcacgcagcatccgccccaaaagggtttcaagccaatacgggaggggcgcggagtcccgcgcagcggacatggccccgttcgacgaagggggcgcagcgtccgacggttttctccccgccgagcgagatgtcggcaggctccggagcctcggccaccagcgcgggcggcaggtcggtaaccgtacagcgggtcgatttttcgctgtcctgcgagaatgtatagagattgatctccgtcgaatggtgattgccgcagcaggtggccttcagcgacgcggttccgtcggaagtatccgcaccgtgctggcagtgatgacagcatacgtgcgcggcacgggccttcatcgcgacgcacttgcacgaaagcgacacatacgcgggtccgcccgtcgccagcaggtagacggaaagcagcaacagcgatatgagtcttttcagtttcatgcaataatattaggttccggctactccagcacgccgcattcggcgagcttccccgcccacgcctgcgcgtcgcgcagggcggtagcctcgtccacctcgtaacgttcggtaagcaggccggcggcctcttcggtggtgaaatcgcggccgcggagcgtctcccaaagatagagcgacgagtcgttgagcgcaagaatccgggtcatatcggcaccgacgcggcccggcatgataatcacatgctcccccgccatctcgcgcactttgaacttttcgcttatcttcatttgtcgaacgtttaaccgaatgcaaaagtatgaaaaattcctcaaaccgcctaatttttcctacctttgtgtgcatggaagggtccgcagacaagattttcgaggtgctgaagcgctactggggcttcaccgaattccgtcccgtacaggagcggatcatccgctcggcgatggccgggcgcgatacgctggccctcatgcccacgggcggcggcaagtcgctgacctatcaggttccgggactcgcgcagccgggactgtgcatcgtcgtcacgcccctgatcgccctgatgaaggatcaggtggaccgcctgcgggcgcggcgcattccggccgtcgccatccattcgggactctcgccgcggcagatcgacatcgcactggacaactgcgtctacggcgacgtcaaattcctctatgtggctcccgaacggctcgccaccgaagccttccgtctgcgcgtggagcgcatgaaggtctcgctgctggccgtggacgaagcccactgcatctcgcagtggggctacgacttccgcccctcgtacctgcgcatcgccgaactgcgcgaaaaactgccgggcgttcccgtgctggcgctcacggcctcggcgaccaagctcgtggccgaggacatcatgcgccacctgcgcttcgccgagccgcatatcctgcgcagcagtttcgcgcgccccaacctctcgtacagcgtccgccgcaccgacgacaaaaacgggcagctgctccggctggtccagaacgttcccggttcgggcatcgtctacgtccgcacgcgcgaaggcaccgagcaggtcgccgacatgctgcgccggcagggcgtgacggctgcggcctaccacggcgggatgggacacgccgagcgttcgctgcggcaggaggagtgggtcgcgggcaggacgcgcgtcatggtcgccaccaacgccttcggcatgggcatcgacaaacccgacgtgcggttcgtcgcccactacgccatgtgcgattcgctcgaaagctactatcaggaggccggccgcgcaggccgcgacggcgtgcgcagctacgccctgctgctgacctcccccgacgacggagggcgcatcataaagcgtttcgagcaggaatttccgccgctcgaaaagatcaaggacatctacgaaaaggtctgctcctacctgcagatcggcatcggcgacggcgccgaagcttcgtttctgttcaacatccacgacttctgcgcccgcgagcacctctactccggcacggtgcagagcgcgctcaaactcctgcagcagaacggctacatgacgctgaccgacgcgcaggagaatccggcgcgaatcatgttctgcgtaagccgcgacgatctctaccgcatccgcgtccagcgtgacgaactcgaccacttcatccgcacgctgctgcgcctttacaacggcgtcttcaccgaattccgccagatcgacgagggcgagatcgccacgtggagcggctacaccgtcgagcgggtcaaggagctgctcaaacggctctggcagctgcgcgtgatccgctacgtcccctccaaccgctcgccgatcctcttcatgaacgaggagcggcttccccgcgccgacctctacatctctcccgacacctacaaacggcgtcaggagctgatgcgcgaacgtttcgaacacatgctcgactacgccgccaacgaaacccgctgccggagcgccgtgctggaagcctacttcggcgagggcgatcccgcgccgtgcggcgtctgcgacatctgtctggcccgccggcgcgccgcaaaacaaaaatccgcggacgccgccggcaatgcggcggaaagcctgcgcaaagaggtgctcgaacggctggcccaaggccccgccgacccgcgcgaactggccgacggatttccgggcggcgtgcagcggaccggcgaagtgatccggcaactgctcgacgagggtctgctcgccaccggcaaggacgggaaaatcaggctgaaataacccggcgccccgacgcctgatcgcaaaaaggtctgcgaacatgtcgttttccggaaataattccgtaattttgtgggaacgttccatcgcatgactacgacaaataattttaccgataaaataagcaacgaggagaccgccgcgcttcccgccatcgaattcaagggcgaaatccgcatcatcgagcatgagcgcgacatcgtgccggcctgcaagtttctgatgaaacaggccgtcgtgggcttcgacaccgagacgcgcccctcgttccgtccgggcataagctaccgggtttcgctgcttcagctctcgactccgcaactctgctttctgttccggctgaacaagattccgctggccaagccgatccttcaggtgctcgaaaccgactccatcctcaaaatcggcgccgacgtggcgggcgacctccgctcgctgcgccagatccgccacttccgcgacggcggattcgtggacctgcagtccatcgcccccgaatggggcatcgaggacaagagcctgcgtaaactctcggccatcgtcctccggcagcgcgtctccaaagcccagcgtctgagcaactgggaggccgcgacgctcaccgacaaacagaaactctacgccgcgaccgatgcgtgggtctgcacggcgatctacgacaaactgctgcacacacccaaaataaaacgtcccaaagcatgacacctcaaatctacctgcgcaaaggcaaggaagagtctcttatgcgccgccacccgtggattttttcgggggccatcgactacatcaaggccgaagacgaatcggaaatcgccgaaggcgctctggtcgaagtatacacccgttcgggcgaattcatcgcgcagggacactaccagatcggttcgatcgccgtgcgcgtgctgtcgttctgccgggagacgatcgatcaggagtggtggaaccgccgcatcgccgtggcgcacgacgttcgccgcacgctgggacttacggacaatcccgacacgaactgctaccggctggtgcacggcgagggcgacgccctgccgggactggtcgtggacatctacggcacggcggccgtggtccagtgccactcggtcggcatgtaccacgcccgcatggagatcgccaaggcgatacgggcgacttacggcgacaaaatcacggccatctacgacaaaagttcgcagacggtgccgttcaacgcccggctgggcgccgtggacggttatctgtggggcagctccgaccacgaatcgcacatcgtgacggaaaacggcgagaaattcctcgtaaactgggagaaaggccagaagacgggctttttcctcgaccagcgcgaaaaccgcgaactggtgaaacgctacgccaaaggccgcacggtgctcaacaccttctgttacacgggcggattctcggtctacgccatggcgggcggcgcccgaaaggtctgctcggtggactcctccgaacgcgccgtgacactcgccaccgaaaacatggtgctcaacttcggccgggaggccgatttctgcgagattgcggccgacgccgtggagtatctcaaggacatcggcgacaaatacgacctgatcatcctcgaccctccggccttcgccaaacaccacaaggtgctgggcaacgccctgcaaggctacaagcggctcaacgcccgcgccatttcgcagatcaaacccggcggcatcctcttcacgttctcctgctcgcaggccgtatcgaaggaactgttccgcacgacggtcttctcggccgcagccatcgcaggccgcaacgtacgcatcctgcaccagatgacgcagcccgccgaccacccgatcagcatttaccaccctgaaggcgaatacctcaaaggcctcgtgctctacgtcgaataagatggcgaaaaccgcaaccgatccggggtacgccgcctgccccatccgcaatatcgtggaccgcttcggcgacaaatggtccctgctggtgctctacaacctgcacacgggcgggcgtctgcgcttttcggagatacaccgccggatgaccgacatctcgcagaagatgctcgcctcgaccctgcggcggctcgaacaggacggcctgctttcgcgcacggtctaccccgaagtgccgccgcgcgtcgaatacgccctcacgccccgcggcgaatcgctcatgccccatctcgtctcgctcatcggctgggcactggaaaatttcgacgcgatcgtcagcgaccgcaactccctgcaagcaaccggaccggatctataaatcacgcacccgaaaccgccaagcagcaggcttcggaccatcgcggtccccgcaacccagcccgccccatcgtccgccctctcagatgccacggcaatcggttcctgcaaccgttccggagagggttccgtcccggccccgccaaacacgcccgacaaatgcacccggcggcgccatgtccgctccaaatagaaaaagtcccttccgggactttttctattttaccttttcgaaaacataaacctcgtgcagttccttgtcgtagccgggataaaagcccttgaccatccccaacacgatccgcgaaccgcggttggccagcaccagcaattcgtcggtctgcggatctatcgccaatccttcgatttcgcccgcacgcaggaaatcggtcatcgcgcgaaacggcagcgccgtcgcataactcttcccgtcgcgcatgtcggcgatatagatcgtatccggctcgtcgaggtccgcatcgccgtcatcggccgagatcagcatccggccgtccaccatgaagatcccctgctgccactgcggaaccggacgcagatgcaccttgcggacatacttccccgtcttgagatcatagccgtacagatagcggccgtccacccagtccgacatccagaccatgtcgttgtcccggtccacggccagtccgctcacctcgacctgccccgattcggggtcccagtcgatcgaacgcttccatttcaggttgtccgcatcgtaaacggcgacctgaatgttctcgcccttgccgtcttcgaaagtctcgataccggcatacagctcgccgttccacacgtcgatatcgcccaagtgattggcttcgagcggcagtccttcgaacgggtgttcgttttcggcgaccagccgcccctgcttgtcatacttgtagagcgccgtgctgcccgaaacgtaataatagttcgagtcggcggcgattccctgccgtccttcgaccggaacgatccgtttgagccgatactccccgccgagactctgcgcccggagcgccgtgccggccgccatgagcgccagcacaaaaaaaattcgtttcatcatagtcgtacgattttacacatccgcaccagagcaaaaacaaggccggagacgcacacccggttcaaaggtttcgtctccggcctgttctctgcagtccattcaacagcccgaacgcttcgggccggttctgaccgctcccggtcaattccagtcgggtccggtctcttcccgaaggcttccggtccgggaactacttgcgtttggcccgctgctgggcctcctgctgacgcatcagctcctcgtagcgctgctggaatttcgatttcttgcctttcgacttcctcgcggcattggcctgcatcacggcatgaatcttctcgtcgtccacgatgcggcggatgacgagcgtctgcccgatcgtgaagaggtttgacagcaggtaatagtagcataagccgctcgaatagctgttgaaccacaacagcatcatgatcggcatcatgtagaccatcataaacttcatgccggccatctggggctgcgacgaagcggtctgctggtaattgaagtaggagtagccgaacagcgacacggccatcagcagcgcgaacaggctgacatggtcgccgtagaacgggatcgagaacggcaggttcacgatgctgtcgtacgacgagaggtcgtcggcccagaggaacggctgctcacgcagctcgatcgacgccgggaagaagcggaacatggcgatcaggatcggcagctggatcagcatcggaatacagccgcccatggggttgatgccggcctttttgtaaagttccatcgtcgcctgctgctttttcatggcatcctccttcttgggatacttcttgttaagctcgtccacctgcggttttatcaggcgcatcttggccatcgacacgtagctcttgtaggtgagcggcgagatgacgagcttcacgagaatcaccagaatcaggatgatgatgccgaaactgccgatgtagttgcgcaggaagtcgaagaccggaatcacacaccagcggttcacccagccgaagataccccatcccagcggaatcagacgctccatatggaggtccgcaccgttgttgtcggtgactttcttcaggatcgcatatttgttgggaccgaagtagaatgcgaaatcatatccttcgacctgcgccgagtagggcacagccatctgcacggagaaactcttgagcagctccgagccgggagccgccgtatcgaaggccatgttggcgctggagacgttctgcggcgcgatgaagaccgacgagaagaactgctgcttgaaagccacccagttcaccgccgtcgatacgctcttcgacttggcgccgtcgctcatacccagctcctcgatcgaactttcgcccggaaaacggtaggccagcgtcgtgtacatgttttcgttctggaaccccttctcgttctggtacgagacattcgaccagtcgatgccgatcgaagtctggttggccatctgcggggccatgttcaccagccggacgttgaaatccacgaggtaatcgcgctccggagcctgcttattatatataaggtactcgtattcgagccatgcgttctccgccaccgcaagacgcatcgtcacacgccgggcatcgcctgccgtctccacgggttcagcgcggaagacgtaatccatcgtattgaccttgacgttgttcaggccgttcttcacatagaacgacatgtcgaaccgggcgctcgcagggtccatcagctcgatcagttggtcgcgctgaccgcggggtgcgtacttggtgtagtccttgagcgtcacgcccgtgatctgtccgccgcgcgtcgagaaacgcaccgtcatcacctcgttctccaccgtaaactcttcaggctctgcctcctgcgccgcggtcagatactcgcccatcgcggcgatccgacgctgacgcacggtctgggccaaatccgcctccgcttcgggcgccgtcgtctcaccggacgccgcaaccgcactctccgcagcgccgcctgccacgctgtccgccgcgggaaccgcgggacgcgaagcggcggctaccgaatcctgataggcctgccacgcggccatttcctgctgatatttctcctgctgtttggtattgacataggcgaatcccagaaaaaggaccgccacgacgacaatacccaaaattgtttttttatccatctaaacgtgtttgcttcttactttgtgcggttattacttcttttccccggcgtatttgagcgccgctccgacgaacgccacgaacagcggcgaaggcttcagcaccgtacttttgtattcgggatgatactgcgtgccgacgaaccacggatggttcgccacttcgaccacctcgaccagccccgtatcggggttgatgcccacggcctgcatgccggcggcttcgaactgctccagatagtcgttgttgaactcgtagcggtgacggtgacgctccgaaatattgagcttgccgtacgccgcggcgactttcgaacccttcttcagcgcacacggataggcgcccagacgcatcgtgccgcccttggccgtcacgcccttctgctcctccatcaggtcgatgaccggatgcggcgtcgattccatttcgctcgaattggcgtcggcgatgcccagcacgttgcgggcgaactcgatcacggcgcactgcatgcccagacagatgccgaggaacggaatgttgttttcgcgggcataacgcacggccacgatcttgccctcgatgccgcggtttccgaagcccggagccaccagaatgcccgacatcttgcccagcttctcggccacggtttcgggcgtgatcttctctgaattgacatagcgcagtttcaccttgcagtcgttcacggcgcccgcatgcacgaacgattcgcagatcgacttgtaggcgtcgggcagttcggtgtacttgccgaccagcgcgatctcgatcttcttcgaagggtgcttgatcttgtctaccagcgcgttccacgcggtcatatcgggttccttgtcggcgggcaggtcgagtttctggagcaccacctcgtccagatgctggtcgtgcatcttctgcggcacttcgtagatcgtcggtacgtcgatcgactccatcacggcgttggcgtccacgttgcagaacagggccaccttgcggcgcaggttcaccgaaagcggatgctcggtgcgcagcacgaggatgtcgggctgcaagccgttttcgagcagcgccttcaccgagtgctgggtgggtttggtcttcagctcgcccgaagccgccatgtaggggatcagcgtcaggtgcaccagcgccgtgttcttatagcccagcgagtagcgcagctggcgcaccgactcgatgaacggcagcgactcgatgtcgcccaccgtaccgccgatctcggtgatgataacgtcgtaaaccttcttctgcgccagcagctggatgcggcgcttgatctcgtcggtgatatggggaatgacctgcacggtcttgcccagatactcgcccttgcgctccttctcgatgacgctcttgtaaatccggcccgtcgtgacgttgttggccttcgacgtgggctggttcgtaaagcgttcgtagtggcccagatcgaggtcggtctccgcgccgtcctccgtcacatagcattcgccgtgttcgtagggattcagcgttccgggatcgacgttgatgtaggggtcgagtttctgaatggtcaccgaatagccgcgcgcctgcagaagtcgggctatcgaggccgaaataatacccttgccgagcgacgacgcaacgccgcccgtaacaaatatgtacttgggtttggaaagtttcattacgtttattactatttattttcgttgttttcgtgattctcctcctgcgcctgacggtcgatcagcttcactttctcgatcgcggcggccatatcctcacgggcgcgctcgatcttggccttcacgtcggcgatcagcgactcggcgttcttcgacttggcgaagaaaccgatattgttctccagcaggccgatctcctgctccaactggcgcaccttgccgtagagccgttcgcgctccgaacgcaggcggctgccgcccgccgacttgaacgacgacaccttctcgcggaaacggttcatcgaacggtcgcgctcggtgccgcgcagcgtgttgaacagcgcatcgacggcggccttgtacttcttctgcacggcgtccttctgcttgatgggtacgaacccgatctcgccccagcggcgctggaagtcgcggatcacgtcgtaaccgcccgtcttgacatcggccgcggccatctcttccagcagcgcgagcttcttcttcagattctcctcgtgctcgccgtccacgctggcgaaatgcgcgcccttgcgctcgaagaatttgtcgcacgccgcgcggaaacgccgccagatcgcatccgaatgccggcgcgacacggcgccgatctccttccagcgggcctgcagggcgatcagctcgtcggtcgccttcttccactcctcgctgttcatcagcgactcggcggcctcgcatatttcggtcttgagctgcagattatgctccatctcggccttcacgcccgaatagaactgacgcttggcctcgaagaacctgtcgcacgccgtgcggaaacgttcatatatgcggttgttgtccttcttgggcgcgaagccgatggtcttccacgtcttctgaatctccagcagacggtcgctggcccggttccactccttgcgggtggtgagcggctgcgcggccagctcctcggtggcggcgcaaagctccgtcttcagttcgaggttgcggacctgctcgcccttcagcgcctcgaagtgctcctgatgctgtttgttgatccggctcgacgccgccttgaaacgctcccacagcacctccttgtattcgttggccacgggacccgtctcgcgccattcgtcgtgcagtttctgcagtttgtggaacgcttcgaccaccgaaggctccagcacgagcgcctcggcctgctcgcacagggtcaccttctgctcgtaattcttcttcaggtccagatcgcgcagctccttgttgatcttgatgaagctgtagaaattctcgacgtgcaggttataggtctcccacaaatccttgacgttctgcaggggcacgatgccggtctccttccagcgctgctgcaactcgcggaatttggtaaaggtatggttgagcgtctcgtccgaattgaccagctccttcagttcttcgataattcccagcttgacctgcaggttcttctccttctcggcttcgagattggcgatgaactcgtcgcggcgacggcggtactccttgaacagctccttgagctgcacttcgaccccgtccactgccggcgcgaaatcctcttcggcgccgccctcctcgatgaatttgcggcgtgcggcttcgacctcggcacggcggatgcggtagaaggcgatcttcagcgcctccacatcccggcggatcgactgcacgggctgctcttcgagcatgcgcgtgaataaagccaccagctcctccttgccccggcccgtgaatttgtcttcggtatcggcggcgcttcccgccatctgctcggcctcggcctcctcggcggtctcgccctctagttcgagtccggcgtcctgcgccgccagcgcggcctcctcgtccgcgaaatccacctgcacgtcggacgccgcagcctcctcttccgtctcagttacgaccgcttcggccgcaggcttgatccgggcgcgcttcgcacgcgccgtctcttctgcgggagccgcttccgcagccgtttcggcggcaggagcttcggcaacgacctctgcggcggggacttcagccgcaggcatctccgcaggcgctccctccccgtctgcaggcgcatctgcggcaacctcgccggcagcaggcgcatctgcggcaacctcgccggcagcaggagcttccgcagccgtttcggcgacggtctcttcggccagcgcttcgcttacgggcgcctcggcggcggacgctgcgggttcgccctgcgcgacagcgggcgtttcgggttctgcaatcgcagccgtttcggaatcagggacttcgggagtcacttcggaagttgccttctgcacatcttcagcagccttgctgacttgctcctcaggagcaggaagaatcggattttcagtagccatctcaatacacgtttttgagttccatatatacggaagtatataaatctcgcaaatataaccatttttcccgtgccgccgaacgatttcgccggaaatttgctaacttcgcacaagatatgcgcggcacacggccaaccggtcgccggtgcgccgccgaaaacgcattgaccgaaattatgagccaccgcatcctgctcgtcgacgacgaacccgacatcctcgaattcgtgaaatacaccctcgtcaaggagggttacgaggtattcacggcccagaacggagccgaagcgctgaaagccgcggcgcagcaccgcccccacctgatcctgctggacatgatgatgcccgtgatggacggggcgcagacctgccgcgccatccgcgaggacccgcagctgcgcgacacgatggtcgtcttcctctcggccttgggcgaagaggaacagcagctggccggcttcggcgtgggggccgacgactacctgaccaagccgatcaagatgaaactgctggtcagccgcgtgcaggccatcctcaagcgcatcgacgccggaaaggcccccgctccggcggaggagggcgtcgccatggaccgcgagcgctacaccgtcacgcgcgacggccgcgaaatcagcctgccccgcaaggagttcgccctcttggacctgctctactcgtcaccgggcaaactcttctcgcgcgaagagatatatgcccggatctggggttcggaggtggtcgtgggcgaccgcaccatcgacgtgcacatccgcaaactgcgccagaagatcggcgacgaaaagatcgtcaccgtcaagggcgtgggctacaaatacgaaccgtaacgccgggcgacgcccggaccgcaaagacatggacagaaccagcaaataccgccgcatcgtcatcaaggctggcagcaacgtgctgacccgcgacgacggacgccccgacaccacgcgcatttcgtccctcgtggagcagatcgcccggctgcaccgcgccggcatcgaggtgatcctcgtctcgtcgggcgccgtggcttcgggccgcagcgtcctcgaacagcgcacgggccgcatcgacaccgtatcggcccgccagctcttctcggccgtaggtcaggtgaagttgctgaaccgctactacgacctcttcaacgaatacggcatcgtctgcgggcaggtgctcaccaccaaggagagcctctccacgcggcggcagtatctcaaccagcgcaactgcatggaggtcatgctcgccaacggcgtgatcccgatcgtcaacgagaacgacaccatctcggtcaccgagctgatgttcaccgacaacgacgaactttcgggactcgtggcggccatgatgcaggccgaagcgctgattatcctgagcaacatcgacggcatctacgacggctcgccctccgacccctcgtcgcaggtgatccgccgcgtgaaaccctccgaagacctctcgcggtacatcgacccggcgcgctcgtcgcggggccggggcggcatggcgaccaagagccgcatctcgtcacgcgtggccggcgagggcatcgaagtcatcatcgccaacggccgccgcgacaacatcctgaccgctctggcgctgaccggcgaggaggtgctctgcacccgtttcgaacccgccccgcacacggcgtcgggcgtcaaaatgtggatcgccagcagcgaaggcttcgccaaaggcgtcctgcgcatcgacgaaggcgccgcagcggccgtccgggccagcaaggccgccagcatcctcgccgtgggcgtcacggccgtcgagggcgatttcgaacgcgacgatttggtgcgcatcctctcgcccgacggaacgcagctggccgtgggccgcatctcgtgcgacagcgaaaccgcacgccgcaacatcgggcgcaaagggctgaaacccctcgtccactgcgattacctctacctcgaataagacgactatggaatacgaatccctgttcaaagccgcccgtcaggccggaacgcttctggccgagaccgaaaccgaacgactcggacgcacgctgatgcacgccgcacaactgctgcgcacgcatacgccccgcctgctcgaagccaacgcccgcgacctcgaagccatgacccccgactcgccgctgcgcgaccgtctgcggctgactccggagcgcatcgccgccatcgccgacgacatggaagccgtcgcgcacctgccctcgccgcagggcgaagagctggagcggcgcacccggcccaacggaatgaccatcgtcaaacggcgggttccgttcggcgtggtcggcatgatctgcgaagcgcggcccaacgtcacggccgacatcttctcgctctgtatcaaaacgggcaacgcctgcgtgctgaagggcggcggcgacgcccgtcactccaacgaagccatcgccgccctgctgcacgaagccctgcgcagcgaaggcatcgacgaacacgccttcaccctgcttccttcggaccacgcctccgtcggagcgctgctgaacgccgtgggttacgtcgacgtcgtcattccgcgtggcggcgcgggcctgatccgcttcgtgcgcgaaaacgcccgcgttccggtcatcgaaaccggcgccggcatcgtccacacctacttcgaccgcgacggcgacctcgcaaaaggccgcgccgtggtctgcaacgccaaaacccggcgcgtcagcgtctgcaacgccctcgactgcctcgtcgtccaccgcgaccggctcgccgacctgccggagctttgtgccccgctggccgccgcccgcgtcacggtctacgccgacgccgaggctttcgcggccctcggcggacactaccccgccgacctgctggaacacgcgtccgaagagcatttcggcacggaattcctcgactacaaactcgccgtcaggaccgtcgcatcgcccgaagaggccctcgcgcacatcgcccgctactcgtcgcgccacagcgaagccatcgtcaccgaaaacaagcggaccgccgcgcagttcacgcgcgccgtggacgccgcctgcgtctacgtcaacgtctcgacggccttcaccgacggcggccagttcggcttcggcgccgaggtgggaatctcgacccagaagctccacgcccgcggtccgatgggccttcccgaactgacgacctacaaatacgtcgtcacgggcgacgggcagatccgggaatcctgaagccttccgcatcggatttcacccgaaaaacaacaaaaaatataacgattcgtaatcattttttccgtaaatttgcacatccttaaaattagatgtatatttaacttatgattcgtgaacttatggccgtgggattcggcggcgcggcgggcagcatcgtccgttatctgctttcgggcgggatcttggccggacagacgctgctgggatttccggcgggcacgttcacggtcaacgccgcgggttcgctgctgatcggcatcctgctggaagccagtgtctccgagacgctgggctggctgctcatcgtgggattctgcggaggcttcaccaccttttcggccttttcggccgacacggtgcgtctgctgcgggccggatgctacaatgcggcggcggtttatgtggcgctgagcgtcgcggtatgcatcgtttttgcagcgctcggcatgtggatcggaacaacatttaggaattaactacatagaaagacaatggtaattttggtattgaactgcggcagctcgtcgatcaagtatcaggtgatcgacatggaagccgcatcgagcacactgctcgcaaaaggcatcgtggaacgtatcggcctgccggaaggcgaccttatccataaacccgtcggcaaacagcctttcgagctgcaccgtccgattcccgaccacacgacgggcatcaaactcgtgctcgacgccctcaccgccccggagcacggcgtcatccgctcgctggacgaggtgaaagccgtcggccaccgcgtagcccacggcggcgaattcttccccgaaagctgcatcgtcaccgaggaggtcaagagcaaaatccgctcgctgttcgagatcgcgccgctgcacaatcccgccaacctcgaaggcgtgctttcgatcgagaaggtgctgccgggaacgccgcaggtcacggtcttcgacacgtcgttccaccagaccattccggccgtcaatttcatgtacgcgctgccccacgcctattacgacaaataccgcgtgcgcaaatacggcttccacggcaccagccacaaatacgtggcgcagaccggcgccaaactcgcgggactggacttcgagaattcgaagatcatcacctgccacatcggcaacggcgcttcggtgacggccgtgctgaacggcaagtcgttcgacacgtcgatgggcttctcgcccgtggacggactggtcatgggcacccgctgcggcaacgtcgatcccagcgccgtcaccttcatcggcgaaaaggagggcatgtcctacgccgagctgaacgaaatgatgaacaagaaatcgggcgtgctgggtcttaccgacctttcgagcgacatgcgcgacatcgacctcgcctacgacgagggtaatccccgcgccattctggcccgcgacatgcactacggacgcatccgcaaattcgtcggcgaatacgcagccgaaatgggcggcgtggacatgatcgtcttcacgggcggcgtcggcgagaattcgtgcgagatgcgcgagagcgtctgcacgggtctcgaattcatgggcgtcgaattcgaccgcgaggccaacaagggcgcccgcggcgtaaacaaaatcctctctactcccggttcgcgcgtcaaagtggccgtcatcgccaccgacgaggagctggtcatcgctaccgacacatacaatctcgtaaaataattttcaaagcacatttccacaacttatgatccaacatcttactgaaatcgtcgaggaggcgagaaaaagaggtaaaaaacggctggccgtggcatacggtcaggattcacatacgctggaggcggtgtacgaagcctacaaggagggcctcgtggagcctacgctttacggcgaaaaaagcgttatcgagcaggtctgcgccgagaacgacatcgacatcaaggcattcaacatcgtcgatgaaaccagcgacgtcaagtgcgtgcagcaggccgtcgcggccgtcgttgccggcaatgccgacgtgctgatgaagggactggtctcgaccgacaaatacatgcgcggcattctcaacaaggaagcaggactgtttcccccgaaaggcgtgctgagccacgtgtcgatcgtcgagatgccctgctaccacaaactgctcgtcatttcggacgtggcggtgattccgctgcccgacttcaagcagaaaaccgtgcagatcggctacctcgcgcgcacagccaacctgctgggcatcaagactccgaaaatcgcctgcatcgctccgtcggaacagttgcttcccaacgtcatctcttcgactgagggcgcgctgctggccaaaatgggcgaccgcggacagctgggcgacgtcgtcgtagacggtcccctgtctctcgacgtggcgctctacaaggacgttgcggaacacaagaaggtcaaaggctcgtccgtcgcgggcgatcccgactgcctgctcttccccaacctcgaatcggccaacgtcttcttcaagtcggtgacgcacctctgcggcggcgaactggccgccatggtcatgggaacgaaagtcccctgcgtgctgacctcgcgcggcgacaccagcaagaccaagctctactcgatcgcgctggcctgtctggccgtgaagcagtaagacagcctgaaccaacccaccaacctaacccaccaacctaattaaccggaaccgatttatgggcttcaaaattctagcgataaatcccggctctacttcaacgaaggtcgccctctacgacgaggagcggcctttgttggatctgaccctgcgtcactcggcggaacagatcgcacactaccccaacatcatcgaccagctcgactggcgccgtgacatgatcctcacggcattgaaggaacacggcttcgacatcatgtccctcgctgccgtaatcggccgcggcggcctcatcaaacccattcccgccggcgtgtacgaagtgaacgacgccatgcgccgcgacctgcagcacgccacgatggagcacgcctccaacctcggcggtctgctggccgacggaatcgcggcgaccgcaggcatcaaagcctacatcgccgaccccgtggtcgtggacgaaatggacgacatagcacgcctgagcgggcatcccgactgcccgcggcgttcgatcttccacgcactcaaccagaaagccacggcccgcctgcactgcgaccgcatcggcatcgtctacgagaaggcgaacctcgtagtcgcccacctcggcggcggcatctcggtcgcggcccacaagcagggccgcgtcgtcgacgtgaacaacgccctcgacggcgacggaccgttcgcaccggagcgcgccggaacccttcccgccggcgaactggtcgatctctgcttttcgggccgctacacgcggcacgacatccagcagatgctggccggcaaaggcggtctcgtagcgcatctggggaccaactccatgatacaggtcatggagcgcatcggtgagggcgacgaaaaagcccgcgtggtgaaggacgccatgtgctacggtatcgtgaagcagatcggcgccatggccgccgccctcggcggacgggttgacgccgtcatcctgacaggcggcatcgcccacaacaaatccgtcgtggagtacatttcggaattctgctcgttcatcgcccccatcgcggtctaccccggcgagaacgaactcgaatcgctcgtcaccaacgcgctggtcgtcctgcggggcgtcatcaccccgaaggtctacgcctgacggccggggagggtcttccaccccgacaaaaaaccgccggttacaccccaaggtataaccggcggttatttttaccgacgctccgtgaatcggcccccgacgcaagcagcgcgaatcaacggtgcaaaaactgcttccggacaatagccgctacctcgcggaaggcttcgagccggaacagggccgacagcaggacataagagaccgcaccggccgtcacttcggccatcagccgcagcagggcatgctccggaatcgcgcgggccgtcagccgcaccgcgccgtacatcgcggcggccgccagcagcggaggcagcagcgtccgcacgaaacgccccggcgacaacgacgtaaacttggtcgtggcgaggaaattgacggacatttcgcagaatgcgatcaccacgagtccccataccacggcctgcacgctgatcggaatcgtcacggcgaacaccagcgtcataatcaccttcttgacgatctccagcttcacgatcaatgcaccgccgctcttgactttcaatacgttgtaggcgattatcgacatcggatagaaaagtcccaccagacataccgtctcgaaatagggcaccgtaggcatccactcctcgcccagcaggacggcgaacatatcgtgcgccacggccgacatgcccagcatgaccgggaaaagaacgtaggagaccaccatcacgacctgccggtagctctcggcaaacttcggagcgtcgtccttgatcttggccagcgcagggaaagtgacgctctgcacggcctgcatcgccgaaatcgtcggctgatccttgagcttgatcgcctgatcgaacgagccgagcgtatcggccggatagagtcgtccgaggaaaaactgcggaatcttattgtagaacgtcgaaatcaggtccgtggcgatcaggctgaaactgaagggagccatttcgcgcagcggcccgcggctgcacgccccgcagggccgccagtcgctcagccaccacagcagcagagtccgcaccgccgcctgcagcacgcgctgggccacgatacaccagatcccgaacccggcgagcgcaagaccgatcgccgccagtccgcccgcgagcgacgaggcgaaagtcaccttcgacaacagcgcgaaacggaactgcctgacgcagatcgtattctgaatggcgcacagcgccccgatgggcagctgcaggaaaaacacgggtgcgatctgcgcgatctgaggcatgtcgtagaaccgcgacgccggaaacgccagcaccgtgaaaagcgcgtacatcaccagcgaaaccccgatattgaaggcgaaaaccgatttgtaatcgtccgccgaaggggccgccttgcggatcagcgcctgcgaaaaaccgctgtccacgagcaccagcgccacggccaccacggccgtcggaatcgccatgacgccgaggatgtcgcgggtcagcaggcgcaggataataaggctcacggccatctggaggagcatcgtaccgatcttctcggccatgctccacgccacgccgcgggcgaccttatccttcagctcccctttcaacggctaacacttttgcgccgcaacgatctcctcgttgcgccggcggatgttgtccacattggcgatctcgacatacgacgcacctccgtcgggtccgaagctgccgcccacgatggccagcagatcctcgcccttgagtttgcggtactgatcgaggaattcgagcgcatcgaccaagaaatgatacttgtcgtgcagctcctgattgcgcagaatcggcaccacgccgtacgacagcgccagaatgcgctgcgcgtggagctggtagcagacggccatcacggtcttccggccgcggaacgcagcgagataacggcccgtacggccggtcttggtgtcgaggaccacgtatttgatcggcaggtttgtcgaagcgcgcaccgccgagcgggccagctgggccgtgatctcgtggttcaccgagaccatgtccatgtcgatcatcggcttgaaatgcgtttcgtcgcgctcgatctcgcgggccacgcgggccatcgtctcaaccgactccacgggatagtcgcccatggcggtctcgtcgctcagcatcacggcgtccacgcgctcgtaaatggcgctcgccacgtcgctcacctcggcgcgcgtcggacgcggactcttgaccatcgaatagagcatctgcgtggcgataatcaccgggcgcttcgcgcaaatgcacttctcgacgatgcgccgctgggtgttgggaatcgcttcggccggaagctccacgcccaagtcgccgcgcgccaccataatgccgtacgacgcctcgatgatctcgtcgatgttgtcgagtccctcctgattttcgatcttcgaaatgatcttgattttgctgccgtgggcatcgagaatctcctgcacggcctttatgtccttggcgctgcgcacgaacgagtgtgcgatgaaatcgacgtcgttcttcacggcccactcgatgaagcggcggtccttctccgtcaccgaaggcaggtcgatcgacaccgcaggcacgttgacgctcttgcgcgaacgcatcgcgccgcccacgacgaactcacagatcagctcctcgtcggtcttctccaccacacgaatttccagctcgccgtcggcgatcagcatgcgcgccccgaccggaatgtcgcgcacgatggtcggcacgttcatataaaccaccttgcgggtggtcatgtcgctgccgtccgaaccccgtacggcgacccggtcgcccacccggaaattgatgctgttgccgtattcgtcggcgatcgtcgtcacgcggatttcaggccctttggtatctatcatgatcggaatggccggattcacccggtgtacggtctcgacgatatgcgtggctccgtcctccgtcacgtgtgccgaattgacgcgcacgacgtccataccggcgtcgtaaaggttcttcacgaactcctcggtgcagcggaagtccgacatcgtcgcaacgatcttggtttttttcattctgtacataaacgtatgatgcttataatttgaacattattgtgtgatcgacatatttacgcggcagccgccttaagccgcctctacaattccagccccccccttctccgagggaacccgctgccgcctgcgcggcagaaacgccggccgttcccgctctgacaggaaacactcccgaatccacgaaagcggcagcccgcacctgctcctatgcaaacggcatgctgccgaaagcggctttctacttttcgttgccaagcagcagcgcttcgactcccaaccggtaggaatccagcccgaatcccatgatcgagcctttggccacgggggccagcagcgagacgtggcggaactcctcgcgcgcgaggatcgacgagatatgcacctcgacgacgggaaccgacaccgccgacaccgcgtcgcgcagcgccaccgaggtatgggtatatcccccggcgttgagcaccacaccgtcgtaaacgccgtcggcctgctgtacggcgtcgatcaactcgccttcgatattggactggaagtagccgaatccgacggcgggatagagcgaccggagccgttcgaagaaggtttcgaaggtctgcgtaccgtaaactccggtgtcgcgccgcccctgcagattgaggttcgggccgttgagaatcaatattttcatagttccgactgttagccgcacacggactccgcccgccgcgattcgcagacaaagatagtgattttaaagaattttttaatatctttgtttaatatcacccaatataaagcgaccgtaacggcgcaatatacgtcaaaccgcccggaaaaccatgaccgaattcggattcatcgaccgcataaaagaccttttcgcaacgctccccgacaacgggttcgaaggtatcggcgacgactgcgccgtgctgcccgtcggcggcggcgaatcgctcgtcttcactacggacatgctcgccgaaggggtgcatttcctgcgcaccgccacctccgcacgggagctggggcgcaaatccctcgccgtaaacctgagcgacgtggcctcgatgggcgcccgtcccatcgccaccctgctgtcactctcgctgcccgacgatgcgaccggagcgtgggccgaagagttcatgcagggttaccgggagctgtcccaagaattcggcgtaacgctcgccgggggcgacaccacccgttcggcggcaggcatcacgatcaacgtcaccgccatcggccgcgccgccgacacgcatatcaaacgccgcagcggagcgcgtcccggcgacgtgattttcacggcgggagctctcggagcctccggggcgggcctgcgcgacattctcgcgggccgttacgacacccccgccgctgccatacaccgcaatccccggccgcaggtcgccgaaggcctctggctcggccggcggcatgaagtacatgccatgatggatatttcggacgggctggcgtcggacatccgccacatcatggagcgttcaggcgtcggcgccgccatcgacaccgagcggattccggccgccgcagatgcggacatccggaccgccgcctgcgccggcgaggactacgtccttctgcttacggccgagtgcgcagacgcggaacgtctcgccgccgacttcctcgcccggttcggcgccccgctccaccccgtcggccggatcacggacggcagagagctggagtggttcgaaaacggaacgctccgccccctcgactggcacggcttcacgcattactgacatttccgcaaccgccgacgggaaaatcgccccggaaaaccagcaaacccaaaaaccggccaaccgccccgacaaaaaatactccccgaacgaatcggcaaccgtacgaaccggcagcccaaaagccggcggcggagaatcggcgaccgaacaaaccggcaaccaagccgaccgggaatcgcaccgaccgcccggccaaacaaaccgcccggcatatcacctctcggccggcatttcgtcccgcggcaaacatttcgtcccgcggcaggccataacaaaaaaacggcagccgaacaaaccggccggccctcgcaccgcccgacatatctcctctcagccggcatttcgaccctcggcaaacatttcctccttcggcagccataacaaaaaacagcggcccgaaggccgccgcatttcactgactccgggagccgtctcccggcataagacttattccttgataatatagacgtgttcgcccctccgctgcatgtggtaattttcgcgggcgtactcctccagataatcgtcgtactgcaaccgctccagcagcgtgctgtcctgctcgatcttcgtccggtaatactccttttcgcgggtcatcgcattgatctgacgcttgattttcacggcatgcagcgaattgcgccccaccacgaacagcgtgacgacgacaatgaccgccgtggcggcgatccagaacttccggcccacctcgaaactcatcagggtatgtgcatgtatttatgcgtctggatggagatattccacttcggatgcgccttggcgtactcgaccatcgcgggcatcacccgttcggcgacgctccattcgggctgcaggtagagcatgcactccggccgcacccgtgcggcgttccgctcggcccattcgaagtcgctttcgctctcgacgatcaccttcagctcgtgcgcccgctccagcgcttcgtccagcgggggctgctgccgtttgggcgacagacatacccagtcgaagtaaccgctgaaagggtgcgtccccgaagtctccagaaagatctgcaaccccttctcgtgcagagtttcggtcaacacgcccagcgggtagagcagcggctcgccgcccgtaatgacgatcgcctgagccggacacgccagcgcgcggtcgatgaccgtccgcacgtcggtcggcggatagagtttcggattccacgtatacttggcgtcgcaccagcggcaccccacgtcgcatccgcccagacggatgaaataggcgggtttccccgcgtggaatccttcgccctgaatggtatagaaatcctcgacgagaggcagcaggcgtcctccgtccagcagttcggtatctgtggtgaaagccattattcggtgaccacgtaaatatctttcagactgcggcccagctggtcgtaatccagtccgtagccgacgatgaattcattgccgatctccatcgcgcggtacttgatcggaatctgcttgcggtaggaccccggtttgaaaaagagcgtgcagacttcgagactcgcgggtttctgcgccttgaggtcgcaaatcatgtactcgatgctctcgcccgtatcgacgatatcctcgaccacgatcacgtggcggccttcgatgctgccgttcagcccgatcaggctcttgacgcagcccgacgaacaggttccctcgtacgaggccagcttcacgaacgacagctcgttgttaaactcgattttcttgatcagatcgctcatgaacatgaacgaaccgttcaatacgccgacgaacagcggcgtctccttgtcgccgtaatcctcgtttatgcgctgggcaacagccgacacagcctcgtcgattttctcggcgggaatcatgattttgaactttctgtcgtgaagttttatgatatccttcatttcgaatccggatttttattgttatttttgcaaaattaattaattgcacgcaagaaacgaacgtttcaaccgaaaataatcgcaaaaacatgaaactttccgaatggttcaaagcccggtccgggcaggagctgatgatgatcgccgtcgtggcgatgctgctcgtcatgatcgccacgcgctgggcctacatctcccgcacggccaaagaggcgatccgccagcggttcgtgccgcccgccgaacaggccgacagcctgcagtcgaaataagaaagggaagttgcttcggcaacttccctttttcgtgtccagagcggcggcgtaaccttccccgccatgctcccggacggctgttttcttcccgacagccgctaccggtttggcacttacaccagtcccgaaaatcccatgaaagccatggcgaggataccggccgtaatcagcgcgatgggcacccccttgaaggctttgggaacgtcctcgaaatcgagacgctcgcggataccggcgaagagcaccagcgcgagggcgaagcccagcgccgtagccaccgaataggtgacgctctgcagcaggttgaactccttctggatcatcaggatcgccacgcccagcacggcgcagttggtcgtgatgaggggcaggaagatacccagcgcctgatagagcgagggcgaaagtttcttcagcatgatctcgaccatctgcaccaacgccgcgatcacgagaatgaagacgatggtctgcatgtagacgatgtccagcgggacgagtacataggtctgaatcagccatgccaccacggcggcgatcgccatgacgaacgttacggcagcccccatgcccatcgaggtctcgactttcgacgacacgcccaagaaggggcagatgccgaggaactgcgccagcacgacgttgtttacgaagatggcgccgatgatgattgcaaaataggaaagctccataactatttcttggctaatttattaaacaaaaccatgaggtatcccagcacgaggaacgcgcccggtgcgagtacgaagatcagcggcatgaaatccgccgtaccgaggctgacgccgaaaatcgcgccgctgcccagtatttcgcgcacggcgcccacggccgtcagggccagcgtaaagcccagaccgatgcccacgccgtcgaggatcgaatccagcggcgagttcttcgaagcgaacgcctcggcgcggccgaggatgatgcagttcaccacgatcagcgggataaatacgcccagcgaagcgtacaacgccggcacgtatgcctgcatcagcatctggataacggtcacgaacgaagcgatcacgacgatgaacgccgggatgcggaccttgtccggaatgatgttcttgatgagcgagatcaccagattcgacatgatcagcacggccatcgtcgccagtcccatgcccatgccgttttcggccgaggtcgtcgtacccagcgtggggcacatgcccagcaccagcacgaacgtcgggttgtttttgacgatgccgcttacgatgatattcagcttattcattttgtcctccttcctgagcctcaggcccgctggtttgttcctccgccgtatctccggccgcggaagtcgcgccggacgacacgtcggtcggggttgcacccgtcgcaacgctcttgtaagccatccatgcacggttgatcgcatccacataggcgcgcgacgaaatggtcgccgccgtcagcgcatcgacgtcgccgccgtccttggcgacggccagtttgccgttcacgtgcttcttttcttcgagtttctgccccttgacgctgcgcagcagcacgttgtcggcgtcggccatcttggttcccagtccgggcgtctccgcctgcttcaggacattgacgttgatcacctcgccgtcgggcgtgaagcccaccatcatgttgatcgcgccgccgaaaccgttcttggtcatcgactccacggcatatccggccagctggccgcccttggtcgcggtgtagaccgtgatcggcatctcgtcgatggtcagcgtctcagccgccgtctcatcgaacgccgggagcacgccgttcagcgcggcggttttggccgcctgctcggcctgagcgatcggttccgccgtgatcatgttcacggcgcccaccccggccgaagcgacgagggtgatgccgaagagcacggccgtcatattcaaaagtgtacttttcatatctgcgtcactcctattttacgccgaagcgcttgggtttgacatatttgttgatcagcggcaccacggcgttcatgatcaggatcgcgaacgacatgccttcgggataggcgccccagagacggatgcacatcgtaatcgcgccgatgccgacgccgaagatcacgctgccccggacggtcatcggcgaggtcgaatagtccgtcgccatgaagatcgcacccagcagcgcgccgccggccaacacatggaacaacgggaactgccacagcaccggaccggccgagagtccgcccttcgccgccgcgacgacaaacgcgaacagcgccatcgtgccgaggatcgtcacgggaatctgccacgtgatgacgcgccgccacaacaggtaaacgaagccgcagatcaatgccagtgcagccacctcgcccagcgaacccggcatgttgcccaaaagcagttcctgcacgccgagcacgtcggcggcggcgccgtgcttcacggccgccagcggcgtcgcgcccgacagcgcgtcgaacgagccgttcaccggtacggggaacgaagtcatctgcaccggataggcgatcagcaggaacacacggcccaccagcgcggggttaaacggattcttgcccagtccgccgaaggtcatcttggcgatggcgatggcgacgaaagcgccgatcagcacgatccaccaaggaatcgacgcgggcaggttgaaggccagcaacacgccggtcaccaccgccgaccagttgccgatggtcgaagcgccgcggaccagaaacttctgaatcagatattcgaacagtacgcaggccgcgaccgaaagcgccgtgacacgcagtacgtccactccgaacaccacggacgagaccgccagcgcgggcatcagcgcgatcacgacgtcgcgcatgatccgggccgtagactgcgaggtctgtacgtgcggtgcgggagcaactacaagtttgtttgccataaatatttggtattttttacgttcggagatttacttcttgggagccgcggcacgcgcacggatgattcccataacggtctgcttgcccagacgcacccagtccagcagcggcaggtacgagggacacgaagcctgacagcagccgcactcgatacacgaggtgatcatctgctcttcgagcgcgtcccagcccttcttctgcgtcattttcgagaggtaatagggttcaagccccatcgggcaggcggccacgcacttggcgcacttgatgcactgcgaagcctcgcggcgcacggcgtcgcggccgctcatcaccgtaatgcccgaacaccccttggtcacgggcgaatcgaggttgaccatcgcccggcccatcatcggaccgccgttgatcaccttgcccgcatcggcgggaagccctccggctgcttcgagcaatgccgaaatcggcgtgcccatgcgggtcagcaggttcttcggctccttcacgcccttgcccgtgacggtcaccacgcgctcgatgagcggcttgttcttctgcacggcctgatagacggcataggtcgtcgaagcgttgcacaccacggcgcccacgtcgatcggaagcgcgggcggaggcggcacctcacggcccgtcacggcggcgatcagctgtttctcaccgccctgcggatatttcaccttgaggggcaccacttcgatccccttataccattcggccagtttgcgcaggtgcgctatggcgtcgggtttgttgttttcgatgccgatgtaagccttctccacggcgatcgccttcatcaggatcgtcacgcccacgagcagttcctcgccgtgttcgagcatcgtacggtggtcggaggtcaggtaaggctcgcactccacgccgttgataatcaaggcttcggcctttcttccgggaggaaccgagagtttcacatgcgtggggaacgtcgcaccgcccatgccgacgataccggcgtccttgatccgggcgatgatctccgcggacgaaagcgcgcactcgcggacaagcgtctccgaacggtcgatgccttcggcccactcgtcgccctcgcgtttgatcgtaatcatcacctggcgcagcccctgaccgttgggaacggcgtcgacagccgtcaccgttcccgaaatcggggagtggatattggccgacataaagcttgacgcctctgcgatgagctgtcccgtcagcaccttgtcgcccttggcgaccttggccgcggcgggcgcgccgatatgctgtgcgaggggaatcgccaccgcatcgggcagcggaagcacctcgatcggtttggcgccgctcagtttattttccgacggatggactccgcctattggaaatgtcttcatatcttaatttctctgttttttcggttggattctttccttcgtcttccgcccaccccggcaggtccacgcccgccccggctctgcggaaaaatccgtttattcggctttggaagcggtttccgccggagcggccttctcagcgttgggcgcggccttctcaggcgcagcggcactcccggcaggcttttcgactgcggccgccttagaagcgtcggccggagcggcctgcccggatgcaagcgcggccttctccgcggccggcttggcggattcaacagccttctctgcggccggtgccgttttctcagcgaccggcgccgccttcggcgcagcgggagccgccggagtcttcggcgccttgggcagcggttccatgccgaccagccggatcgcgcccgtcgggcactcgttcacgcacttgcggcagagcttacacttctgcgggtcgatataggcaaggttgttcgcaatcgtaatcgcgtcgaacgcgcacaccttctggcacttgccgcagccgatacatccggccttgcaggctttcatcaccaccgcgcccttgtccttcgacacgcacgacacgtataccgcacggttcttgggccacttcttgcgcagctcgataatcattttgggacatgccttcacgcaggcgccgcaagctgtacacttatcgggatcgacttcgggaagccccgtttcgggattcatgcggatcgcgtcgaaagcacaggagacgacgcagtccccgaatcccagacagccgaacgcacagcccgtttcgcccacatagagcgacgaagccacggcacacgacttggcgccgttgaaatcgttggtgcggggacgcttctcgcaggttccgccgcagcgcacggtagcgacctgcggttccttttcgggagcggacttgccgaggtaagccgcgacggccttcatgcagtcgccgccgcccacgggacagaagagcgacgaaatgtcgtcctgcttcacgagcgcatcggccatgccgcggcagccggcgaaaccgcagccgccgcagttcgcgcccggcagcatcttctccacctcgtcgattctggggtcctcctcgacccggaatttctgggccacgaaatagaggatcaccgcggaaagcactcccagcgcacacagcgtcaggattgtgtaaagtaatacttccatcagtagtttttggttattgagaaatgaattgtgtgttcgattttatgtctgaagagccataacacgcagtaatagacgcctactgcggccaatgccgccaaggcgctgcggccttcgctccatcccagcgcggcgaccgccgcggccagcaccgccaacagcaccgccagcgcgccgacataggccaatataacggcgacagcgcccgcactgcggcggacgccgaccgtaacgctttcgcctgcggtgtagtgttgctgcgctccgggggtcgtcacctcgacgatcttttcccgcgcttcggccaagccgcacgcctcgcgcgccttgcaggtgccgcaggcgctctgtgaggtaatcttcacatagacccggtcgccttcgacgcgcgacacgatcccttcgtgttcgatgattccggatgccacgcctcagtcgccgtatttattggtcaggggcatcagccgttcgtgcccgaacgagcacatcgacaggcgcagcacgggcggaaactggtaacgcttcttctcgttgcgcatgatcatgcagtggatcttctccacgacttccgaatcgaaccccgcattgacgatctcctcgcggtgctggccctcctcgatcatgcgcagcagaatggcgtccaccacctcgtagggcggcagaatatcgctgtccttctgtcccggatgcaactccgacgacggctccttgtccagaatgttttcgggaatcacattgccgaacgtgcggttgatataacgcgccacgtcgtacatctcgctcttgtagaggtcgcccgtggggctgaacgcacccgccgtatcgccgtaaagcgtacaaaggcccagcgcattctcgctcttgttcgacgagttgagcagaatgtaatccgtcttgttctgcacggccatcagcagcaccgtgcggatacgggtctggatattctcctccgtggcgtcgaactcccgcccgccgatgaccggcttgagggtgttcaccacactggtatatatttcggtaatgggaattacgttgtattcgataccgaggttctcggccagcttcttggcgtcttcgaccgaatggtccgacgagaactgcgaaggcagcagcagggcgcggacattcccggcgcccagcgcgtcagcggccagacaggccaccacggccgagtcgataccgcccgaaaggccgatgcaggccttcttgtaaccgttcttgaggaagaagtcacggagtccgcagcgggccgcctgatagaccatccgcgtgcggtcgttgtaggtcgaaggaaccccgacgggaggattctgggccttggtgtcgaaaatctggaaatcctcctcgaactgcttcatcatcagcaccagctcgccgcggttgttgaacgcgcccgacgtgccgtcgtaaacgatgtccgtcgcgcctccgacctgattgaccagcaccagattcttggcttcgacgaacgacagatgacgcatcatatcgtaacggtaggtcatggtgcccttgccgtatttgcgggcgttgatcgagatgacggtttcgaccgacttgtcgaaatcgtgctcgcggctcaggtcgtcgcccacgatgatggcgcacttgtgacctttgatcgtcgcatattcgaaccctttcgaggggacgagaaagcccatttcgcggcgggccgtgatatatttcttgcccacgtagcgcagcaccttgcggtcctgaatcagcgccgcggcgctgatggttccctcgcgcgtgaggatcggcagtcccacgatcgcggcgatgccgtcgcagcacgaagctatttcgaccagcgcgtcctcgcacaattcgaggaaggtcgtcttacgcagcagatcgaaagccggtgtcccgctcacggcctgttcggcaaagatgacaaggtcggcgcgctgcgctttcgctttgttgatggaatcgatgattttcgaggcgttgccgtcgatatccccgatcgtgtagttcaactgggcaatagctatcttcatttgttagtaattttagtccgaaaattacgactttgcaaagttaaggaatatttataaaagtcggaaggattttggtgttaataaattaacactcgccgcaccgccgccggcagccggagattccgcatgacgcgaaaaaaagtttcgattttttctcgctccgttccgcctgacgcccagcattagtttcctcaatgtaagtaacatacgcgcacgtaccgtcttgcagccggcgaacgttctccttatctttgccctgaccgaatacaaacgtatcagcaaaccaaacgtacagcaaagatgaaaaaagtcgaaaaaacagccggcggcgcgaatttcgctgccgtgacagtaggaaagatggacgagttgaaccagcacacgctgatcttggctccgggcgtcgagatccccggaaaagtatttgcgggcagcgccctcggcgccacgggcgcggagttgtcgttccagcgcatcgagccgggcgcaggcgtcgggttcctccacacccacaagacgcacgaggagctctacatcatcatccggggcgacggagagtttcaggtggacggcaaaatcttcgccgtcggcgagggcagcgtaatccgggtctcccccgacggccgacgcgcgctgcgcaacaccggcgcggagccgatgattatgatctgcgtccagtacaaagccgattcgttcgcatcgtccgacgccgacgacggggtgattctcgacgtcggggtcgtgtggtagccgcccgcgaaaacgaagagggccggagttgaatgactccggccctcttgtttactgaatgatccgctactcctgaacctcttcgggatcggtcacgagaatacgtccgcagtactcgcagataatgatcttcttgccctgacggatttccacctgacgctgcgggggaatgcggttgaagcagccgccgcaggcgtcgcgcttgacggtcaccacggccagtccgttgcggacgttctggcggatacggctgtaggccgccagcaggcgctcgtcgatcttggctttggcgcggtcggcctgcacttcgaactcggcgaccagcggtgcggtctcggcctcgatgccctccagctcgctcttcttggcggcaaggtctgcggcgcgtccgtcggctacggcttcggcctcctccagctggagcttcttggccttcacgccggcgctgtactccttgagacgcttctcggccagctcgatctccagctcctgatactcgatctccttggtgatggcgtcgaactcgcggttgttgcgcacgttgttctgttgttccttgtagtttccgataagaatcttggcctgatccacctcgcgcttgcgctgtttggtgagcgtattcagctcctcgatttcggcattgatgttgtcgatacgggttctcaggccggtcatctcatcttcgaggtcctgtacctcaagaggcagttcaccttttaccttgttgatttcatcgattttgctgtcgatcttctgcagctcgtaaagcgccatgatcttctcctgcatcgaataatcaacttcggcagttttcttttgtgttgccatataatgtcttctatagtttagacttaaaccaaatagttcaccggattgcgcgagtcctcactcttgcgaaccgcaaaggtaatcaaatttttcgataaaatatcaaataaaatctgaattgcgcaatattcgctttcaaaatggcctatatctgctacggtgagggctttatcgggcgtcatgaagtcgttgtacttcatgtccgccgtgatgtagatgtcggcccctgcgcggcgggcttcgccgatcatcgaagccccggcccccgtgcagaccgccacgcggcgcacctccggcgaagcgatgtcgctatgacgcacgacgcgcacgccgagcgttcgctggatatggcgcatgaactccacggtcgccacggctcccggcagttcgcccaccacgccgaacccgaccttcgcgtcggccgcggagggctgcagcacacacaggtccgccacgcccagcatctcggccagccgccagctcatcccctccggcgcgctgtcgagattggtgtgacaggcatagagcgcaatgccgctgcggatggcccgctcgacgcagcgctgcacctgatcggccgaattgaaccgcttgagggcatggaaaacgatcggatggtgcgtgatgatcagatcgcacccctcgcgctcggcttcggccatcacctcgtcggtgacgtccacggccaacagcgccttgcgcacctcgtcgtcgggccggcccacgatcagcccggcgttgtcgtacgactcctgccacgccagcggcgcaaaacgctcgatgacgtcggttatttcccggataagcataatttatatcgttaatatatacattttcccaaccagaatacatcccggcgggacgttgtcgcggctctgagccgcgtttacaagtctgccccccgaaatcccctcctcggaggggagtgtttacgacacaaggccgccggcataccgggcaaactccgccctgcgcagcggcggaaatcccctaaaacagcgactgctcgtaaaaggcgaacaactccttgttctcgacctcctccttcttgcggcggggtttgcgggtacgcttcgccaccgagtgtcccgcatcggcggcttcctcaccttccgcagcgatcttcaccacgggtttgcccctgcggcggggtgcggcggcttcggcgtccggcgcatccggcacggcaccggcgtcagtatcggcgtcagcgtcggcaaggatttccccctcgccggccttcaggtcctcgcgcacctcgaccagcagcgcgcggatacgctgcagacgctccatcagctccgcatcgcgttccattccgccctcggcaggctgctgccggagtgctttcttcgccccttcgagggtcattccccgctccttgaccagatgatagatcagtttgagattctcgacatcctgcggcgagaagagacggtttcctttcttgttgcgcttggggcggatgacgctgaactgcgactcccagtgacggatcagcgacgcattgacgtcgaacatctcggccacttcgcccatcgaataaaaaagtttctcggccatatctattgtttaataattcgcaatgaattgggatacatgttgtttacccggtttcctatgcgcttcgcgaatccgagcgcacggccccgcgcgcacaccagattgatcccttcggcaaaaggtccggccccgatctcctgcctgcgcaggaagcggagcgtctgctcttcgtccagctccgcggcgggaaccgcatcccggttcagtccgcagaagaacgccagcgcgggatcgggacgcaggcggcccttgaagagctgccccatcgccacgcccgaatatatcaccggaagcgcttcggccagcgcttttacggcttccgcctgcgcgacgtaatagccgtaacaggtgtcggcgaccgtcacgaagcacatccgttcggggctgttcacccagcggcgcaactcggctgccgcggctctgtccaccgaagcgaagaccgtgcgccgcgccttgggcgtgcggcagcggccgcccgcatcgaaagccttgcggaccacggcggcgaaaaatccctcgccgcgcgcccggtggggataaaaccggaaggtccggaacgctcccacgcgcccgcagacaatcccccacgacgcatcgacggcgacttccccggcctgcgccgcttcgtcctccgcccagccgagcatccgttcgagtacgccttcgtcctcgtcgcggttgaacgtacaggtgctgtatatcagcactccgccgggtttgagcgcacgccacgcttcacgcaacagctcgtcctgccttgcggcacaaagctttacattgccttcgctccattcgccgcgggcgtcgcggtccttgcggaacatcccctcgccggagcagggagcgtccaccgccaccacgtcgaaccacgcttcgaaaccgcccagctgccgggcttcgcacgtcgtcaccgcaacgttgcccgtgccccacttgcggacgttgtccgccagcacctgagcgcggcggcggtcgatctcgttggcgacgaccagtccgtcaggccccacgagcgacgcatagagcgtcgtcttgccgcccggagcagcgcaaaggtcgagaatccgcctgccggcgacttcgacaccctgcaacaaatgtcccacgaactgcgacgcggcctcctgcacatagtaggcccccgcatgaaaatcgctgtcgaaggtgaactgcggccgcgccgcgaggtaatatccgtcgccgcaccacggcacccggccgtcggcatcggccagcacggcaggcggcactccgtccggacgaacgaccaccttgtccgcgtcctcctcccgcccggctccgccgttctccgtaccgccgcacttggccgggttcaggcgcaccgacacgggcggctcggtgtcgagcgccgcgcagagcgccgggccctcgctatcgcccagatcgcgcaaaacgcgctcggcaaacttcgcaggcagcgtcatgcgttacttccgggtattaagcgcatccagccgcgcgcagattttatccagcacggcaggatccgaaatgaaatcctcatggtccttgtccaccacgagcacgtcgccttcgtatatgttgtctatccagttgttgtacttgtcgttcagccgcttgaggtacagctcgtcgatattcatctcgtactcgcggccgcgcttgcggatctgcgaaatcagcgtcgggacgctcgccttgagataaatcagcaggtcgggcttgggaatcagctcggtcaccagcctgaaaatcttcatgtaggtttcgatgtcgcgcgtaggcatcagccccatttcatggaggttgccggcaaagatatgcgcatcctcgtaaaccgtgcggtcctgaaaaatcacgcccgaaccgccgtcggagagcatgtccatcgtctgctggatgcggcttcccagaaagtacatctgcagattgaacgaccagcggttcatatcttcatagaagtcgccgatataggggttgttgcactcttcgagatacgacttggcattgtagcgcttggtcagaatctgggtcagcgtcgtctttccgcttccgatgttgcctgcaattgctatatacatattatacgatatttgttttacatttttgtcctgccggagcattccggcgccctgtcatcatggcgtcgcgccgcaaaaacgtccgccgtcacttcttctccccgccgaacgccagaatctcctcggccacatggcggtcgttgaccagccgcggcaccttgttcttgccgcgggcgcgcagccatgcgaggaaaagcccgcggtccacgaccgtcagccgctgccgttcgagcgtggtccggcgcttggcgtcgtaatccgaattcacggcccgcagctcccggtcgagcgcttcggcgaaatgctcgcggctgtcgggctcacgctcgaactccacgatccactcgtgggcgccccgctcccggagcgacatgtagcacggcgccacggtatactccccgacgacggccccggtctcgttgctggcggcaatcagggcacggtcggcgttatcgacgatcagctcctcgccgaagacgttgatatactgccgtgtgcggcccgcgaaccggatccggtagggattcgtcgaggtgaactccaccgtatcgccgatttcgtaacgccacaaaccgttgttcgaggtgatcagcatggcgtacacacggccgcactccacgccctccagcgggacgatcgtcccgccgctgcggaactcgaagaagttgccgtagtcgagcatcagcagcatgtcgtcgcgcgacggatcgtcggccagcgcgaagaagccctccgaagcgttgtaggtctccatgtactgcatccgctccgagggtatcagcgcctcgaacgagcggcggtaaggaccgaattccacgcccccgtgggcgaacatgcagaggttgggccacacttcgagcaggttctgccgccccgtatattccagcacgcgacgcatcatcgccaaattccacgacggcacacccgcaaaggccgtgatgttttcgccgacgcactcgcggcagatcgcctcgaccttgcggtcgaagtcgggaatgagcgccgtggccatacgcggcgcacggaaccagccgctccagaacgtcgtctcgtgtatcagtatggccgacaggtcgcccaccagattgcgcccttcgcggctgcacgacccgcccagcgtcagcgtcttgccttcgaaaaccccggtcttcggattgttgcccgaaaagaccgtcgccacgtcgcgcatgcccagcgtatggttccaccagagcgactcctccgtgaccgggatgtatttgctccggtccgacgtggtgcccgacgaacgggcgaagagcttcacgcggcccggcgaagcgacgttcttctcgccggccagcatcttctcgatatagggcttgaacgtctcgtaatcgaacgtttcgaccatcgtctggaactgttcgaccgtgcggacatgccccaagtcgtaacgccagccgaattcggtccgccgtccgcggcgcagcagctgcctgaagacgcgttcctgcgtctcggccggccggcgccggaaacggtcgatggcccgctcgcgctgcgaaaaccatgctttgagtaatatgcttctgaatgacacgtgtctgttcggtttcgttgccggcggcgtgcgctgcccggcggcgtgcgccgggcagcgcggcacgcgccgtcagttaaaaaagtatcctactttgcccacggacgcaggcatggcgaagaccaccacgcggtcgtaggggttgatttccatattgtccacggcgatgaacaccttgtcgccgcgcacgatgccgccgatgatcgtatcttcgggaagtcccatgtccttgatccgggtcttgacggccggagcgttgggcttgacgatgaactccagcacctcggcgtcgctgcccgtcaggcacttgatggcctgcacgtcggtggacatcgtgaagcggaatatgttcgacgccgtcaccagtttcttgttgatgatcgtgtcgatgccgatcgactcggcgaggttgatgtaattgaggttctcgacctcggcgatcaccttcttgacccccatgcgcttggcgagcatcgccgcgaggatgttggtctcgctgcggcccgtcacggccacgaaggcgtccatattggaaagcccctcctccatcatggcctcggtgttgcggccgtcctcgttgattatcagcgtcttatccagcaactccgccagccgataggccttctctgcgttgtaatcgaccagcttgatattcacctcctcctgcaattcggtggcgatgcggatgccgatgcgcgaaccgccgaggatcatcatgttcttgatctcgatattggactgcccggagaactccatgacctgcttcacggcgtcctgacgcgcgatgacgtagatcacgtcgccctcggtgaagatctcgccctgccgggggatgatcgtctcgccgctccgcgtgatggccaccgtgcggtagctcagcggcgtctcgtcgtcgtcgaagccctcgatctgccgtcccaccagcggcgaggccggttccagacggaacactaccagcgagagtttgccgctcgaaaaatcgacgtactccgtggtcgaggtgtgccccagcaggttgatgacctcgcgggccgccaccttttcgggatagaacaggtagtcgatgcccatgtcgatgaacatctccttgttgttgggttcgaggtactcgttgttgtcgatgcgggcgatggacttccgggcgcccagcttcttggccagcatcgccgccacgacgttgtcgttctcctcgtggttcacggcgatgaaaaggtcgcacttgcgcaccgaagccttgcggagcacggcgaaggtcgtcgaatccccctcgacggtaatcacgtcggccagactccccacgtcggaaagcagtttctggtcgctgtcgataatggtgatgtcgtggccgttgccgctcagcatcttcgccagatggctccccatctctcccgctcccgctattacgattttcatagtattgcgtcgttgtctttttgcatccgccgccgaagagagggcagcgtttttgcaatttatcttacaaatgtatacatttgtgaccgaaagccaaaatttcgggacgtaaaaataccttattgatatgccgacatggttaatcgtttttctgttcgcggtgggggccgtggcccttttcgtcgtgggcatgtcgctgacgctgatgatcaaaggacataacatcgactccgagatctcgaccaacaagaacatgcagcggctgggcatcaagtgcgccgtacacgaaacgcgcgaagcggacggcagcgccggctgctccgacacgcatacggccgcggggtgttcgggcaactgctcggcctgcgacatcgaagaggccgggcacggaaaatagccccggatgcgaacgcgctgaaacccctgcaaacccgccgcacatgatccgacaacccgaatccccgaagacattcgtctggcgcatatgctcggcgcatgtgatcgcctacttcaccgccggcgttttcgccctcctcttcctcgattacagaacccacttctcgtccgagtcgctggctctgctgatgcggcccgtaagctcaccgtgggtcgcgctcggccccggactgcagattttccgaggagtgctgatcgcgctggcgctgctgcccgtacgcggattcctgtacggcaaaaacggattcctcaagctggcgtggctggttctgggcctgagtttcatctcgaccataggtcccacgcccggctcgttcgacggctacatctacacgatcctgcccgtgcagtatcatctgggcggaatccccgaagccgttttatacaccgcgctcttcgcgggcatcctcgccttctggcacaaatccggaaaaagatacgtcacggtgctctccatcgtacttgtggccgtaatcgtactgctcagcgtcatgggattcctcggcgcggcgcaggcggagtaacgcggcggccgtcgggcaaaaccggaatctaccggatgtgatcgagtggcgaaagctggcagtagttgctggggctgaatgaggttggcgggctgtagcaggctgaggttggcaagctgaggttggcgggcagaagctggccgaaaccggctgaggccgactcgccggcgaataaaaaaatgaggttgcccgacgcgcggacgacctcttcttcgtatatctcggcaacggttcggaaccgcttccgtcaaatcttgcagtgtttcgaccggcagacgaaccacggattgcgcaggtcctcctcgttgtagagcagttcccggtcgtcgggcagcgtgcgggtgcggccgcccgcttcggcgaggatcagctcgcccgcggcagtgtcccactcgtacgtatgcgtcgtgcggacataataatcgaccttcccctcggccagcaggcagaatttgtaggaactcccctgctcgacgatctccagatcgggatgcgcttcgcgcaggcgggcgatatgctccgccgtttcgggcgtctggtgcgaccgcgacacggccacccgcaggcgggggtgctccgccccctcttcgagcggcagctgccgccagcccgtgacgatctggtcgtaagtgtattcggcggcggcatccggcgcaatatgctccttgacgtaggaacccgaatcccgcccggcgacgtacatcttttcgaaataggggacataaatgaccgcccccatgcagacgttgttctccatcagggcgatattcacggtaaattcgttgtttcccttgatgaactcgaccgttccgtcgagcggatcgaccagccagtacaactcccagttgcggcgttcgtcgtagcgcatctcgcggccctcctcactcaggatcgggatgcgcgtgcggcccagatattcgcggatggttttgtgtgctaggcggtcggcgagggtgatcggcgtcttgtcgtctttgaggcttatatcgtaatcgtctaaattcttgtaaatattcattatcgaggctccggccctgactgccgcattgaacagcggcggcagcagatacatcctcaccttgtcgtttatcatcgtagctcgttttttgagttcggtaatttcgattgccatggtaaaggtaacaagaatttatgatatggtaaaatttttcactcctattttacagcggcgcagcagccccttctcgtcgccgcccgtacgcccgcaggcaatatcgctaagggccagcgaaacacatccggcgacgcaccacacgagggctgcggtgagcagcacggcagccgccggccaccggcccgtccatacggcggcgacgatcgcagcggccagcgccgcagccggcacgacacgcagaactgcctgcaaaccaatacgctgcctgcgcgcagactggggcgtatagaaaaccggctcccaaaggctccgccgacggcgccacggaacggctttgcccggacggcgcgcaaaaccgccggccgcaacgacggcttcgcggctcagcagcgcggcaggctctccgatccgcgaacgcacgcaatcgcaccctccgacgccccgctcccccacttcggccaccagccgcgcgacagcgtccggcagcagaaactgtccctcccgcaccggcagcacgtaatcgtaagcggccacttcggccgccgcatcgaaatcgccggcgggagtatcctgcgcacggtccaccagcaccagcctgcggaaacggcgtttgcgcgaacgccccagcgcacgcacgcccgtcacgggcagctcctccgacagcgcgtattcgacgcggatcatgcggtagcgggccgtaaaggccgcaaactcgacgggataacgcagggaatcgagcaccacgatcacctcatagtgtgcatattcggccgaaagcaggttttcgacctgctcctgcgcatggacgccgctgcacaacaccgatatcccgatgccgccgggcgtgtcgctcgccacggcgtgcgaacctgccagcagcagccgtttgttatgtccccgcacgaccagccagagcagcgcgagggccgcagcggcgacagcggcaagcagcagtaacagcacgatcagcataccagactccgtttataggaatgtataagcgattcgtagtagggacgctcccggtcgccgaacaaccgccgcagcacggcaggcgcatagccctcccgcgccatgtagcgcatcagcgccttgcgttcggcgcggctcatcgaggcgatgcggcccgccacctcgcgccgcctgagcgaacagcgcatcgagcagagcgtgtagagcgcttcgcggcccagttccggctccctttcgcgggccaccatcgccagcagaagcctctccgcctcctcgatgccgaactgccgcacgatgcccagccccaccatccgcaggttgcggttcggggagccgacgagcggttcgtaggcgatcggcagcagaccgcggcgcagcatggccatgatctccgacacttcgcaggccgaaaagggatagtcgtactccgccatccggcgcagcgaggtcgcaggttcggccgccagctgcgtcatcagggcgtagaagcgcacgtaacggttgcggctgcgcgtatagcgggcggcttcggcgccgactccgtccccggcgggcagccgggagagcagcatcaggtagcgcgcacggcggtacccctgcgcgaagcgtatccggcgcagcagccatccgtccagcccgtattgcacgacgatgcggcgcagcggcgccgggtcgagcccgtaggtcgccgccaccagcctgccgacggtttcgatcagcagacggcgggcgcccgcacggcgcaggagcggaaagcgcggtgcctcttcgccgcccgaaaatagggcgagcatgacgatatgcaggtatttgcgctgcagcacggcatcacggccgcgcctgcgtctgcggcgcatccgcccgaccgccatcccgccgagcagccagagcgtcacggcggcggccgccgcggaatatatcatgaaaagcgtttcggtcataaaagccggttcaaatcgttggacaccttgccccgcagccgctgcaggctcagcgggaaagccatatactggtccacgccgcactccagcaggctcaggacggcctgttcggactgaagccacgaaaccacgtaaaacagcggccgcctcagtcccgcgggacgcacgccgcgcacgacgtcgcggccgcacaagaaaggggccacatgcagcacgatcaccagatcgaacaatacgcggcggcaaagcccttccatctcgtcggcatcggccgcacaacgcacctcggtgcgcatgtcgatcagcgacagacgcaccatatcgcgcataaagacatcgtccgaaacaatcagtatcctgttcataaaaaccccgtccggcgtgtgccggtgccctgccccggcccaaaaccatgccagagccgcacggggccaaaaaaatttgccggatatgttgtttataagataaatatgcgtatatttgcactccgaattatgttcaaatacataaccatcgaataaatgtacgttatagtagagattgcaggtcagcaatttaaagctgaaaaaggtcggaaactttatgttcaccgtcttcagggcgaagaaaattcgtccgtaagtttcgacaaagtcctgctcacagacaacgacggtcaggtcaaagtaggtgcacctgtagtaaaaggcgcctcggtgaagtgcaagatcctgaaacacctcaaggacgacaaggttctggtgttcaagaaaaagcgccgcacaggatatcagaaatgcaacggccaccgtcagtatctgacacaggtccttgtagaggaaattgttgcataaccctttaaaacggaagagaaatggcacacaagaaaggtgtaggtagttcgaagaacggacgtgagtcggaaagcaagcgactcggcgtcaaactgttcggtggccagttcgcaaaggcgggcaacattatcgttcgtcagcgcggcacggttcacaaccccggtgaaaacgtgggtatcggtaaagatcacacgctcttcgcccttgtagacggcaccgtcgaattctgcaagaaaggcgcaggcaaatcgtacgtgagcgtaactcccctgagcgagtaggcgttccataagcaacacaagacaggcggcttccccgacgggaggccgcttgttttgtgaaccccggaagcgcaagacacacggtccgaagatcatagggcacacacaccaaagatcatacggcgaccacacgccccaaagccgtttttcggcaatcgactccgcggcccggccccaatacagacaggtagttgcagattgcgaaaaattgattacctttgttatgcggtacaccgtattgcatgcgttcttaacatatcgagtatataaacgattgtattaacatcctgaaatctggtaaattttttgtaagtccaaatacagtccgctcccggaagggtgcgcgctgttttgttggatttacgggtttaccagaacctcaggagttacagattcagcggcactcttcttctttggcacaaatgagtccatttgtccgcactcctgccgatgcaatcgaatcatatgcggcggcaggatgctttccgataatcggattcttcatacaaaagagagttgcgtcacttttttcctgccgccgttcttttttactttctccgtccgcaacatattccgcacatccggccgaccgagcagttccgccgcataacacaaaaaaaacggcagcccctcagagaaggagtgccgcaaattatccgcgccggcgaaactacttcttcgcaggctctttttcgacggccttgaatacggccagcgacttgtcgtcgtcgaagaaggtcagctccgaacccttgatttcgaaacggtccacgtcgtcgagcatcttgacgaacgcatcttcgtactgcatgtcggggcaggccatccgggtcatgcccatattctcgaattcgagtttcttgcccttcagctcatagcggccgaagaaacggttgcagttggtgcgtccggcgaccatcgtgtcggcggcattgaactccagcgtgaagaaatccgcctcctgattgatcgccgtcgccggaatcgcccccatttgggcgagtttccaagtcgtaccttcgagcgtcttgtcctgcgcggcgcttccgcacgcagccatcgtaacgagcagcgctgcggctgcaaaatactttttcatcataaatacatataagttaataacagaacgccgcgtgcaaaaaccgcacaaaacctgacggcgtcgactcttacgcgccccaaagttagcaattcccggccggatacgcaaccccggcgacaaaaaacacaggcaggttctcacataggcagtttttgggcggctcccgaaaaaaagccatccggaacaaatcgctccggatggccgcaaatcgggcaaagccccgaattacatttttttcaggaattacatttttttcagataaaccgcgatctgcagttccgtcgttgcgttgaacagatcgtcgagaatgacagcgggatcgagtcccatcatctgcgacggatcgagtcccagcccgccgagcacgtccttgagcagcttgacatagggcagcatcatggcgcggtccacatacaggcggaacacaccgccctcaaaggtgtacttgaacggaatggcgtaatggctgtcggtcgaaacgacactcagccccttataagcgccgagcatcttgtcgatctcggaaagaatctccatcccctcctgcttctcgatcgcccggatgaaatccttgctgacggcagcgaagaacaggttcgactccgtatagaaactcagcgcgccttcgggcaggacagcggcggtctcggcactcggaaataccgatacggcctcggcgaacgtcggcgagaagatcgtcgtcatgatgtcggccccctcctcgaccaccacttcatggtacttggctgcaaacaagccgtcgctatgcagatcgagctgaaccagaccgctcgacacgaattgcgaaccgatggccgacaccaaatccaagatggtattgaacggcattatgaacgaaccggcaggcatatccatgctcgcagagagatcgataccgggaatattatccggatccgtccatgcagcggctacttccagataaaacctcgaaggctcaccgcccccctcgtcgggcacttctttaaaatagtgcggcatatagctgcccaccaattcggacgatacctgcggtttcttcacctttccgtcgtcatcgttacaagccgtaaaggcggccaaagcagcgcacacgacaaacacggacgcaattttgtgcaagagatttttcataagcgagattagatagtgttaattcaaatgtgcggcaaagttatctccggggccgattatgaacaaataaattcattcgggggggggatttttcaaacggacagcaaatttttcatcacgaaccgaatcgccggaacacaaaaaaggccgcggcactgatgccgcggccgaagccgtttcgccgcccggacggatttcgaacgactccccgaacggttttcgaacgaacctcctgacagcccgccgaccgaacggttttcgaaccatccgctcggacagattccggactgtcgtccgaacctatttcgggcgccttcccgaaggagtttcagactgccattcggaggggattccgccccaccgtccggacaaatcccggaccgcttcccggaggaatttcaggtcgtcatcccggacagatttcaggtcgccggacggattccgaaccgccatccgtacgaaccacaactcggacgcaccgccgccccggaaatcgcaccgaaaagcgggcggcattcccggcggcgcaacgtgcggccgcaaccgccttatccgaacaagcggttcagcagcgccgccaacctgtatccggctttcagcacctgcgcctcggcgaactcgtacgagaaaatgatgaagtcgcgcgactcctcgtacgaaagcgtctgaccggccttggtccagtcgtagatcacgcggcactcgcgggcgctgtcggccagccagtcgcggggcgtgccttcggcgatatcgcgtttttcccgcttcgaacagcggtcgagctggtgcccgtattccagataatgccacttgttgctcagcgtaagcgcccactcgtcccaataattatgcaggccgtactccttgccgctgagcgtgaatttgaaactcttgtaccacggatatttcacgtgccccggacagtgcatgtcgccgacgagatgtacgataaagcggatcaagaccgtcaccgtcgaatcgttttgattgcggtaatcctccactttcgcaatgcagtcgtccagaaaagtcatcgcgtcgccttcgggatcgggcacgtagtttcccccggcatcgaccttgttggtgtgccacgtgttggtgtgcctgtaggccggcgtgtggcggacctgatccatccacgaggcataatacggccgccgagatacttttcgatgtttttcttggctttgggcgtcaggttgcattcggcgatgtaggcgatcgcatcgtggccgattttcccccagccgaacgccgtcgcgcaccaacagctgagcacggccgtcagcagacatacggatagttttttcatttcgaattagttttaaggtgatttcgaaacaaatataaagaatagatattaaataagcaataaaaagcaattacaatcatttctttttatgctttatcctatccatgcaagcgatacgacgccggacgcgatacggcccgccaacaaaaaaaaagccgcggcacaatgccgcggcctttcacatagctgtcatacagatcagtactccatcttggcaagacgctggtagctgttgtaacgccacttggcgttctcctcagcggcagcgaacagctcctcggcctcggccgggaacgacttcttgagcgaagtgtaacgcacctccttcatcaggaagtcgcggaacttcgaccagtcgggttccttcgagtccatcacgaaaggattcttgccctgctcttcgagctgcggattatagtgccacaggtgccagtagccgcaggctacggcctccttgcccacggtctgcgtgcgcgtcatgccgcccttgatgccgtggttgatacacggcgcgtaagcgatcacgagcgacggtccgggataagcctcggcctccttcagcacgttgaagagctgcatctgcgacgcgccgatcgaaacctgcgccacgtatacgtaaccgtaggtcatggcaatagcgccgagatccttcttgcggatacgcttaccggccgacgcgaacttggcgacggcgcccacgggcgtcgatttcgacgactgaccgccggtattcgagtaaacctcggtatccacgaccagaatattcacatccagacccgaagccagcacgtggtccacgccgccgaagccgatgtcgtaaccccagccgtcgccgccgatgatccactgcgacttcttcaccagccagtccttcatttcgagaatgcccttgcagtagtcgcaaccgcaggcctccatcatcgggatcaggcgggccgaaacctcggccgacttggccgacgaaccgcgcgcggcgatccactcctgcatgacgcccttcagctcgtccgagcacttcgtgcagcctgcgatcgcctgctccatcgactcctgaatacggtcgcggagtttctcgacgcccacgtgcatacccagaccgaactcggcgttgtcctcgaagagggagttggcccatgcgggaccctgtcccttgtcattggtgcagtacggcgtcgaaggagccgaacccgaataaatcgaggtacagcccgtggcgttggccaccatcatcttctcgccgaacagctgcgaaatagccttgatatagggagtctcgccgcagcctgcgcaggcgcctgagaactcgaagagcggttgcgcgaactgcaggttcttgacgctcttggtcttgtccacgacctgcttgtagccgatgttctttacgatataatcccaattcctctgctggggcagctgcgattcgagcggtttcatcaccagcgccttctccttggcggggcaaacgtccacgcagttgctgcagcccgtacagtcgagcggcgaaatctggatgcggaacttgtagtccttcgtctcgcccagaccctgcttccactctacgcccgaagcggcagcttcggcctccgttgcgaggaacggacggatcacggcgtgcgggcagacataggcgcactggttgcactggatacagttctcgatcttccattcgggcacgttcacggcgatgccgcgcttctcgtaggcggccgtaccgttctcccacgtaccgtcctcacggcccgtaaaggccgatacgggcaggtcgtcgcccttcaggccgttgatcggctcgacgatcttgcgcacgaattcgggacacgaagcatccgaaacatgcacgaagcccttgtcctcgatcgaagcccactcggcaggaatctcgaccttaacgacggcatcgccgccggcgtccacggccgcatagttcatgttgacgatatcctcgcccttcttgccgtaggacttctggatcgccttcttcatctgctcgacggccttgtcgaacggaatgacgttggcgatcttgaagaacgccgactgcatgatcgtgttggtgcgcgaacccagccccagctcggcggcgatcttcgtggcgttgatgatatagaagttgatcttgttcttggcgaggtaagccttcatgtgcgcgggcagcgtctcgcaggtcgtagcggcgtcgtgcaccgagttgagcaggaacgagcccccggccttcaggcccttgagcacgtcgtacttgtccacgtacgaaggcacgtggcaggccacgaagtcgggcgtggtgaccagatagggcgaagtgatgggcaggtcgccgaaacgcaggtgcgacgaggtgtagccgcccgatttcttcgagtcgtaggagaagtatgcctgacagtatttgttcgtcgtgccgccgatgatcttgatcgagttcttgttggcgcccaccgtaccgtcggcgcccagaccgaagaagagcgcttcgaacgtgccgggcttggccagcgagatctcctcgcccacgggcagcgaacggaacgtcacgtcgtccacgatacccaccgtgaactggttcttgggttcgttggccgcgaggttcgtgaacacggccagcatctgcgccggcgtggtgtccttcgacgaaagaccgtaacggccgccgatgatgagcggcttgttcttgcacgggcaggtggcgaaagcctccaccacgtcgaggtagagcggatcgccgttggctcccggctccttggtgcggtccagcacgcagatgcgcttcacgctttcgggcagcacctccatcatgtatttcaccgagaagggacggtagaggtgaacggtcacgacacccaccttcccgcctttggcgttcaggtaatcgaccgtctccttgagggtctcggtcaccgaacccatcgcgatcacgatgttctcggcgtctgcggctccgtagtatacgaagggcttgtactcgcggccggtgatcttcgaaatctcgcgcatcgcgtctgcgaccatgtcgggcacggcgtcgtagaaggtgttggcggcttcgcgggtctggaaatagatgtcggggttctgggccgtaccgcgcgtcacggggtgttcggggttgagcgcacgctggcggaaggccttcagcgcgtcgcggtcgagcatcgccgtcagggcggcttcgtcgatcagctcgatcttctggatctcatgcgaggtacggaaaccgtcgaagaagtgcaggaacggcacgcgcgacttgagcgccacgatgtgcgccacgcccgcgaggtccatcacctcctgtacggacgaggtggcgatcatcgcgaatccggtctggcgggtcgccatgacgtcctgatggtcgccgaaaatagacagcgactgcgcggccagcgcgcgggccgacacgtggaacacgccgggaagcagctcgccggagatcttgtacatattcggaatcatcagcagcaggccctgcgacgcggtaaacgtcgaagtgagggcgccgctctggagcgaaccgtgcacggcgcctgcggcgcccgcctcggactgcatctccacgactttcaccgtttcgccgaaaatatttttacgaccttgtgcggcccactcgtccacgagctcggccatggtcgaggagggcgtgatggggtaaatcgccgcaacttccgagaacatgtatgcaacatgcgccgcagcgtaattaccgtcacacgtgataaatttcttttctgccattttgttaaaattttagatgatattgtgtgtgttttctgaattcaggacagaatgcgttgcaaagatagcaaatccggcggaaataacagtccgatttcagaacaaaaaatcaggaatttttaccattcggggtgttagcggaataacactcaaggttgttaattttttaacacaaacctgcgtaaatcacggagttgcaaaaccggtttacccatagcgcgttaccacggcggcacactttccggcgctccgccgcgcctcctccggggagcgtctcccggctccagaacagacgcacattccattccgtgccaaaataacgcaaaacagcttgcattgagcaaattcgggtttaacggatgggttgttcgggcagtgcaattgcagatcgggaaaatttttctacttttgttccccgaattcgttctttacatatcgtcatatgtcaacgatgtattgggaccctaaaatctggtaaattttttgcaatcccgcaatatccgtcgtaccccgaagggtgcgtgctgtaatttgtgggattgaaggcttaccagagccgtagggtccgcagattcggcagcactcttcccgttttcctgccgcagcacaccgtaccatatgcggcggcaggatttatggattcacaatccccaaacttcatagtcacagaatccatcaaacaaatgaggcgtcactactattcctgccgccgcttttttactatctttgcagccatatgatcgaatacaaaaagaaaatactggcgaacggactcacggtcgtcgtcaaccgcgacccggtctcgaagctcgccgcggtaaacatcctctataaagcaggcgcacgcaacgaaaatcccgaacgcacggggttcgcgcatctgttcgaacacctcatgttccgcggtacgcgccgcatacccaacttcgacctgccggtgcagatggcctgcggcgacaacaacgccttcaccaacaacgactataccgatttctacatcaccctgccgaaagacaacgtcgagacggccctgtggctcgaaagcgaccgcatggaggggctcgacatcacgcccgaaaaactcgaaaccgagaagcgcgtggtgatcgaggagttccgccagcgctacctcaaccagccctacggcgaccaaccgatgctgctgcgggcgctggcctacaaggtccacccctaccgctgggccaccatcgggctgacgcccgaacatatcgcccaagcgacgcccgacgaggtgcaggccttctaccgcgcccactaccgcccttcgaacgccattctttcgatctcggccgacattgacgaagagaagatgctcgatctggccgaaaagtggttcgagccgctcgccaaccggcctgcggccccggaccacatccgtcaggaaccggtccagaccgcaccacgccgcgaggtcgccgagcgcgacgtccccgccacgacggtttcgctggccttccacatgggcggacgcacctcgcccgacttctacatcgccgacctcgtgtcggacctgctggccggcggcgactcggcgcggctctacacccatctggtcaaggagcagcggctgctctcgtcggtgaacgcctacatttcgggcgacgtcgatcccggactcttcgtcttcacgggccagctcctgccggagacgacacccgaacaggccgaagcggccttccgcgccgaaatcgaagcgctccggacccggcctgcgacggattacgaggtcgagaaggtcaaaaacaagttcgaagccaacacgctcttcggcgaactgaacgtaatgaacaaggcgatgaacctcggcttctacgagatgctgggcgacctgccgctcgtcaaccgcgaggttgcggcctaccgggccgtcactaccgacgacatcatcgacttcagccgccgcacgttccggcccgaaaactgttccaccctcatttacaaagcaagcaaatgacacaaccgcctctcgtaatacccgcgaccgtcgaggtcccgcaggccgaaaagacgacgctcgccaacggcgccacgctctacacgctcgcctcggacgacttcgaagtgctgcgcatcaccttcgtgttccgcgccggatcggccgtgcagcgggttcccttctcggcatcggccgcggcgaacatgctcgcagaaggcacgcgcgacatgacggcgcagcagatcgccgaacagctcgactattacggctcctatttcgacgtcaacatcgaccgggactacgcctatatcagcttctgcacgctctccaaattcttcggacagacgctggccgtggccgagcaggtgctcctgcatccgacatttccggaggaggagctgcgcacctactgcgccaagcgcaaacagcggctggccatcgagcgtacgaaagtggacgtcgaagcccgcgaagcgttcgcccggacgatgttcggtcccgaacacccctacggcatttcggccgacgaaaacgattacgaccgcctgacgcgggccgacgtcgcggaattctacgcccgccattacacggccgccaacggcttcgtggtgtgcagcggacgcatcggcgagcaggaacgggaagccgtggccgccctcgcggagcggctgccgcggtcggagtccgaaaccgggacgccgtttccggcgcccgtaacccggcacgaagccttcgtcgaacaccccggcgccgtgcagtcttcgatccgcatcggacgcatgctcttcccgcgccagcatcccgacttcttgggcatgcaggtcgtggcgtcggtgctgggcggctacttcggatcgcgcctgatgcagaacctgcgcgaagagcgcggctacacctacggcgtggtggccgccatggtcaatttcgaacaggcgggctacttcgccgtcgcaacgcaggtcggcaccgacgtcacgcgcgacgccctgcgggagatctacgccgaaatcgaacggctgcgcacggagccgatgcccgacgaggaactttcgctggtcaagaacatcatgatcggcgaaatgatgcgcattctcgacggtccgttcggcatcgccgacgtcacgatcgaaaacatcctctgcggctgggaccacaccgtcatcggcgagaacatccgccgcatacaggccatgacgcccgccgacatacagcgtctggcgcagaaatacctcgcgcgcgaggatctggtgaccgtcatcgcaggcgaccccatcccggaggagcggcaggccccggaagaaaaggcggatcgccagtgacgcgcagccgaatttcaccccggcggccgcagcagcgcacagacagaacagtaagcggaagccccgaccatacggaaccggcaacaaaaaagcatccctcaacgggatgctttttatttcaatgcaggcatatgacgcatggccgcaggcttatgatcgcacaacgtatgaccgcagacgcataatgcacggcgcatgatgcacggcgcatgatgcacggcgcacggactccgaacggctacgttctgttcgccgcaacccagtcggtcagctccacgaagtcggcgaccgaaagctgctcggcgcgctgcgtgaagaaaggatgctccgcgccgccgaaattgccgaataccgaccgcagcgagttgcggatcatcttgcgccgctgtccgaaggaggctttcacgactttcacgaacaacgtttcgtcgcaggcgagccgctcgacgccgttgcggcgcaggcggatcaccgcgctcttgaccttgggcggcggattgaaaaccgtctcattgaccgtaaaaagatactcgatgtcgtaccacgcctgcaaaagcaccgaaagaatgccgtactccttcgagccgggaggttcggccagccgcacggcgacctccttctggatcatgccgacgcattcaggcaccagatcgcggttctccagcaccttgaagaatatctgcgaagagatattgtagggaaaattgccgatgattttcagccctccgggaaacagttcgcgcaggttcatcttcaggaagtcgccttccatcagacgcggcgtgaattcggggtaatgcgcatgcaggtattcgacgctttccgggtcgatctcggccccgtaggtgacgatgtcgtcgcgcctgagcagaaactgcgtcagcacgcccatgccgcacccgacctccagcacgtcgcagcgcccggcagctttcgccccctgcccggcatccggcgtaacatccggctctatacccgacacaccctccggccctgtctcctgcgcaacatcccgcccggcacccgccacgacacccgattccgtactctgcacgacatctggtccggcacccgcagcgacatccggcccggcagcaatttccgccgtccggccatcgactgcgactgcggcatccccggttgcggccgctgcacccgtctcggcagcgtttccggtccctcttttcgctgcaatgattacggccgtctccggctcctccggtcctctcccagccgcagcctgcccgtccgctccgggaagagcggcaacagcaggagctgtccgcagccggatctctccgcccgaaagtgagtcgcagattttgcgcgcaatattcagatcgaccagaaaatgctggcccagcgcctttttagcccttacttcactcattctatttcagcaattcataataacagccgtccacgaacgctccgttcccgacaaaagcgcggtgcatcgtccccacgaaacggaatccggctttgtccagcacccgctgcgaagcgggattcgagacgtatgcggcggcaaagatacgaattatcggggtatttgcgaaaacccactccgcggcccgcgccacggcggcggtcataacgccccgtccccggtacgagaccccggtacgaagccccgatccgacagccgattccggcgttgaaccgcccgacatccgtccccggcgccaacccgatgccgcccacggctttgccgccgatcactacggcgaaatcctccggcgggggggggctgcgtaatgaaggcgtgcgcatcgcccggcgaatagggaccctgcagcttccgaaaattcccggccaagacaaccgcatcgatcttccggaaaattttccgaagttcccggccctccgcctcagccctctccaaaaaaatccgccgggcgcaatgtccggcggataactctcagcgcttctgtctgcgcgatttcttcttctcctgccgctccttggcccggcgttcgagccgcacgcggcgctgcgtcaggcggaacgtgtagagcaggcccacgaaacccacacccagcagcgtaatccagaaccagacggcaatgccccgttccatatactccagcgcgtaaatcacgcccgcgaccgccgcgatcatcatcacgagacggacgatctgcataacattcgttttcctcatatcactccttattttacacgtttccgactccgggcgccggccgccgcaaccgcagcgccgcacggaccggcacacaaaaccgcacgcaaaaccgctgcacggacccgcgcgcaccgatcgtcctcttccccgcgcgccatacgccacaaaacaactgcgtcgccctgccggaaaacacggtctccacgctccgaaacaactgtaaagcgccccgtcaaggaatctggtgccggttcacctcgtcgaggtgcctgcacttgcgcttatggcattcgttgtacaccatacccgcgccggccagtgcgaacagcaccgccacgatcaggtcgaaaatacagtttttgttcgacaaagcccagaatatattgacaccgagccacacgagcgtcacaatcaggaaaatcacggcaacagtaaaagtctttttgttcataggcgtatttgttaagttagtccattcctcggaacagtgacgcaacagccgcgggacagcaggtcggtacagggcgtcagttaccctgctcgcacatgaatttgatacgcaccagacgtatctcctcctcggtatagtcggcccccagttcgtcgatggccgcatcgagcgagtcgctctcggcgtcctccttgaaatagaggtatatgtcctcgatcttgtcctcgtccataaactcccggaggtaataggagatgtcgagcttcgtgcccgaattgacgattccctcgatctcggtcagcagctcgtcgaaatcgagatccttggcacgggcgatgtcctcgaaatccatcttccggtcgatcgactggatgatgaagatcttgttgcccgacttgttgccgaccgacttgacgatcatgtcctgcggacggatgatctccttctcctcgacgtaggccttgatcagcttgatgaactcctcgccgaacttgcgggccttgcccacgccgacaccggtaatgttctgcatctcttcgagggtgatggggtactgcacggccatatcttcgagcgacgggtcctgaaagatgacgaacggcggcagcccgtgctgcttggcgaccttcttgcgcaggtccttgagcatcgagaacagctcctcgtccgccgcgccgcccttgcccatcggggccacggcctcggcctcccgctcctcctcgtcgtaattgtggtcgagcgtcacggtcacggggaacggcatggcgatgaaattctcgcccttgcggttcaccgagatcagtccgtaattctcgatattcttgtccaccagtccgaggatgagcgcctgacgcagtacggcgccccagaaactggcgtcgtgttcggcgcctgcgccgaaccacttgctcttgttgtgtccgtagctctttatcagcgccgtggtcttgcccgtcagcacattcaccagatagtcgcccttgaacttgtcgccgatgtcgcgcagagcctccagcagcatcttcagcgcggccttggcgtcgatcttgggccgcggattgcggcagttgtcgcagttgccgcagttctcctccgtatactcctcgccgaagtagtgcagcagcgtcttgcggcggcacatcgaactctcggcgtacgacaccgtctccagcagcagcagtttgccgatctcctgttcggcgataggcttgccctgcatgaacttttcgagtttctgaatatccttgtaactgtagaaggtcaggcagtagccttcgccgccgtcacggccggcgcggcccgtctcctgataatagccttcgagcgacttgggtatgtcgtaatggatcacataacgcacgtcgggcttgtcgatgcccatgccgaatgcgatcgtggcgacgatcacgtcggcgcgctccatcaggaaatggtcctgattggcggcgcgcgtcgcggcgtccatgccggcgtggtaggccagcgccttgatgccgttggccacgagcagttcggtcagctcctcgaccttcttgcggctcaggcagtagatgatgccgctcttgccctcgttctgcttgatgaagcggatgatgtcgcggtccacgttgtgcttgggccggatttcgtaatagaggttcgggcggttgaacgacgacttgaagaccgaagcgtcggacatgcccagattcttctgaatgtccagctggaccttgggcgtggcggtcgccgtcagggcgatcagcggcgcaggaccgatttcgttgatgatcggacggatgcggcggtactccggccggaagtcgtgcccccactccgagatgcagtgcgcctcgtcgatggcgtagaacgacacctttatcttatgcaggaaagccacgttgtcctccttggtcagcgactcaggggcgaaatagagcagcttggtctttcccgacagcacgtcggcgcgcacctgcgccacggcggtcttgttgagcgacgagttgaggaaatgggcgatccccgaatcggccgagaaggtgcgcatggcgtccacctgattcttcatcagcgcgataagcggtgaaatgacgatcgccacgccgtccatgatcagggcgggcagttggtagcacagggactttccgccgcccgtcggcataagcacgaacgtatcgtttccctccagcacattgcggatcacagcctcctgattccctttgaacgacgaaaagccgaagtactccttcagtttgtcgtgcagcagggacaattcattttgtttcatttcgccgattctactctttattcacaaattcttaggtaaagttagcaaaaaattcggaattccgcaccatctaccgataaaaattcagcgtcccggcgattggagcaagcccggccgcgcccggctcaacgaaatggtttcgtttctttccggtacggacacaagaacgggcgccccggaaaaatggcatattctatgcaaaagagttccccgatcccctgcaaacagtttgctgtccgacgcttattaaccgacataaccagtcagccatgaaaaaacgcttactatccgcactgctgttcaccgccgcactgagtctcccggcggccgcgcagacgctccccgcacaacccgccccggaaggctccggcacacgaccggcaccccgaacaagcgccgccgagatcgacgacgccaacgacgccgcttcgccggaagaagtctcgaagaagatcacccggttcgagaagattctcgccgcgctgcccaaattttcgggctatgcacagatcggctacacctaccagaccaacgtcgggggaacggacggcaaaaattcgtcgtcgttcaacgtcaagcgcatgcgtctgatcctcacgggcgacatctcccgtacgttcgactacaagatgcagttcgagggcttctccagctcggccgaccagcagggcaaggcgctcatcaccgtgcaggacatgtacctgcgggccaaaatccgcccccagatacacatctgggccggccagttccccgttccgctgaccatcgagaattacgacatctcgcccggcacgctcgaagtccccaacttctcgcacgccattctcaaaatggtctgccgcaacgccgtgtcgggctacaacacctacggacgcgactgcggcctgcaagccacgggcgcgttcctgcaccgcgacggctgggacatgctcacctacaacctcgccctcttcaacggctcgcagatgaaccgttcggacgacaacaagtcgaaagacatcgtggcgcgcctcacgttcttccctctcagggagctgcgcatttcaggctcggtgaactggggcgaatacaccaacaacacggtttcgaaggactatatccccatgacgcgctacgccgccggcttctggtacgacagcgaacacatcctcgtccgggccgaatacgcgcacaccggctcctccgcggcctacacagacaagacgacgggggaaaagacacgcggcaaggtcgacgaacagatgtactacctcatcgcaggctacaaattcaagggcaaatacatgcccgtaatccgctacgacgtcttcaacggcaaacgcaacacctacctgcccggctcggtcggcaagcagcaggactttctggtgggcttcctctacatgcccattccgcggctgaaggcgcaggccgcatggacgctttcgaaatactcggcggcgggagccaagaacggcaacggcttcgaagtggcgctgatcggattcttctgacgcccggcccgattgtccccgcagttgccgggacaacatcgccgcacgctccggcccgcacgcccggccgccggggaacatttccgcggccgttcggaacctttttgccgccgctgcggacaatttccggacttcgccccctttccggagagaattatggccccgcggtttggagtttttacctactttatatacctttgttgcgacggccccggcccgcagccttcccgttccggctcatccgcccgaatacgaaaccgcttcgggatgaaggggctgcaaacttaaccatgcagcaacatgcgcctatacacaagcgaacttgtcaagaaatataaagcccgtacggtcgtcgatcacgtctcgatcgacgtcaatcagggcgagatcgtcggactgctcggccccaacggagcgggcaagaccacgaccttctatatgatcgtgggactcatcaagcccaacgaaggacgcatttttctggaaaacgacgagggacaggtcgccgagctgaccaacgaaccggtctacaagcgcgcgcagatgggcgtgggctatctggcgcaggaagcgtcggttttccgccgcctgtcggtcgaggacaacctccgcgccgtgctcgaaatgaccgaatattcgaaggagtatcaggccgagcgcgtcgaatcgctgatcgaggagttccgcctgcagaaggtccgcaagagcctcggcatccagctttcgggcggtgaacgccgccgcacggagatcgcgcgcgccgtggccatcaacccggcgttcatcctgctcgacgaacccttcgcgggcgtggacccgatcgccgtggaggacatccagtcgatcgtggcgacgctcaagcacaagaacatcggcgtgatcatcaccgaccacaacgtcgacgagacgctggccatcaccgaccgcacctacctgctctacgaaggcaagatactcaaaaccggcaccgccgaggagctggctgccgacccgatggtccgcaaggtctatctgggccagcacttcgagctgaaaaagagccaccagctgacgcaggagatgaaaaaccgcaaaactccgcaggaataacggccgaaacacgaaatcagggatgcggcgcttttgcaccggcatccccgctcaatcatatatcacccataatggataagacggttccatcgggccgcgtcaaaggcacgctgacgccgccctgctcgaaaagctacgcacagcgcgccttggcggcatcgcttctctgcgaagagacctccgtgctgcgcaacatcgagttctgcagcgacacgcgctcggcgttgcagtgcatcgagacgctcggcgcccgcgtgacccggatcggcgaagagacgctttcgatcgaaggcgggctgcgcccgcaggggcacacgctccgcgtcggcgagtcgggtctttcgacacgcctattcacccccatcgcttcgctctgcggcacgccgatcaccatcgaaggcgagggcacgctgctccgccgcccgatggagatgatgacaggaccgctgcgcacgctgggcgtccgggtgcgcgacaacggcggattcctgcccttcgaagtccgcggaccgatccgcggcggcgaggtcgacgtggacggctcggtttcgtcgcagttcatcacgggactcatgctggcgctgccgctggcccgacacgacaccacgatccatgtgcggagcgcggtttcgaccccttatctggacatgaccatagacaccgcggcccgtttcggcgtggaaatctgccataacgattacgaagagttctacatcgaaggcggccagcgttacagcccggcctgcctgagcatcgagggcgactggagcgcggcggccatgctgctggtggccggcgccgtcgccggagaggttacagtacggaatatctcgatgctctcgaagcaggccgacacggccgtctgcacggcgctggtccgggccggcgccgccgtcatcaacgaagccgattcggtgacggcgatcagccgcccgctgcacggcttcgaattcgacgccaccaactgccccgacctcttccccgcccttgcggccctcgccgcggcggccgacggcgtcagcacgatccgcggcacttcgcggctgctgcacaaggagagcaaccgcgccgaggcgatccgcgaagaatacgccaaagtaggtatcgaagtggacatctcggaagaggcggtcatgcgcatccgcggcggcaaaatccgcccggcgcgcgtttcgagccacgacgaccaccgcatggccatgtcgatggcggtctcggcgctgcgctgcgacgggcagataacgatcgaaaacgccgagtgcgtagccaagagctaccccggcttcttcgaagaccttgaaaaaatcagagtttaaagccatgaacattttcggtcataacttcaggctcgccatctggggcgagtcgcacggccagcagatcggcatctcgatcgacggcattccggcaggcgttccgctttcggcggaggatttcgaaaccgacctcgcacgccggcgcagcggcgcgcgcggcaccacgccgcgccgcgaacccgacatcccgcagatcgtgtcgggactctacaacggcatgaccacgggcgccccgctgaccatcgagttcgccaaccgcgacacccactcgcaggactacgccaacgtgatgcgccactaccggccctcgcacgccgacatggtggcctaccacaaattcaacggcttcaacgacccgcgcggcggcggccacttctcggcccgcctgaccgtggcgctcacggccgcaggcgtggtcgccaagaagatactgccgccgggcgtgaccttcgacacccgcgtcgcggagatcggaggctgcaccgacccggagggtttcgacgaggtgctgcgcgccgcggccgccgagcaggactccgtaggcggcatcatcgaatgccgcgtgcagggcgttccgctggggctgggacagcccttcttcgactcggccgaaagcatgatcgcccacctgctcttctcggttcccgccgtcaagggcgtggaattcggcagcggcttcgccggggcgcgcatgcgcggctccgagaacaacgacccgttcctcgacgtcgaaggcacgacagcgaccaacaacgcgggcggcatcaacggcggactgaccaacggcaacgaactcgtcgtccgcgccgccgtcaagcccacgccgagcatcggccgcgaacagatgacctacaatctggccacgaacaaggtcgagccgctgatgatccgcggccgccacgacgtctgcgtcgccctgcggggcgcggtggtcgtcgaagccgccgtagccatcgcgctggccaacttcatccgctaatgaccacgcgccgcgacatactcggccgtatttcggcacgcctcgcgcccctctacggggcgcgtgaagcacggagcatcgccctcgtcgccgtctcggagctgtcggggctgagcgcgtcggccctgctgaccgatcccggcgcgccgctcgaaatcgcggagctggacgacatcctcagccagctggccgcaggccgtccggtgcagtatgtcgtggggcgcacggagttctgcggccgcacgttcgccgtgcacgaaggggtgctgattccccggcccgaaaccgaagagctggcggcatggatcgcgcaggccgaaaccgaagccgccactctgctcgacgtgggcaccggaagcggctgcatcgcggccaccctcgcgctggcgctgcccggcgcgcaggtatatgcggcggacatctccgacacggcgctggaaaccgccgcccgcaactgccgggcgctcggcgccggggtcatcctgcgcaaggccgacgccctgagcgatctggccgaagtctttccgggaccgttcgacgtcatcgtctccaacccgccctacgtgccgcagagcgacctgcccgcgatgcacgtcaatgtgcgggaatacgagccgcacgaagcgttattcgtccccgacgacgacccgctgcgcttctaccgcgccatcgcccgcgccggacggcggacgctccgccccggcggcaggctctacttcgaaatttacgaacgcttcgccgacgccatgcgccgcatgctcggcgaagagggatatacggacaccgaggtccgcgaagacctcaacggcaaaccccgcatgatatgcagccgcctgaagtaaaaacgaccgggaaacgcgccaaaacgcccgaacaggccctcgccgcactcatgcggctctgtgcgcgcgcagaaaagtcgcaggacgacgcccggcggctgatgcgcggctgggggcttgctgagcgcgagggcgagcaggtgctggcgcggctcgtccgcgaccgcttcatcgacgacggccgttacgccgaagctttcgtgcgcgacaaactgcggctgagcggctggggcgaatacaagatccgcacggccctgcagcgcaagcgtatcgacagggagctgatcgacgcggcgctggcgcaggccgaccgtcaggatatggccggccggctgcggcagcagctggaacgcaagatgcggacgaccagacatacgacacaatacgaactcaaaaccaaactgatacgttacgggctttcgctgggatacgactacgagacggtgctcgacagcgccgccgcgctcgtgacggacacggagacatgcgacgaattctgacattactgcttttcacgacgatctgctccggggcgcagggccagcggctcaaccccggagattacatatatccgatccgcggcgtcgcggggctttactcggccaacttcggcgaaatgcgtcccggacacttccacggcggcatagacatcaagaccgacggcggcgagggcaaacccctcgtggccgtggccgacggttacgtctcgcgcgtgagcgtcagcccgtcgggctacggacgggcgatatacctcacgctcggcaacggcacgacggccgtatacggccacctgcaacggttccgcggcgacatcgaaaaacaggtccgcgaagaacgctgccgccgccgcgcgaacagcgtcgatctctggttcggccccggcgcatggcccgtcgcacagggcgacacgatcggattttcgggcaacagcggttcgtcgatggggccccatctgcatttcgaactgcgcgacaccccgacccagcggctttacaacgtcgtgcgcgaaggcgtcgtccgccccgacgacgacctgccgccccgcatcatgcgcatccactacatcgaggtggacagcgtgcagggcgttcccgtccacggcagtccggagagctatgccgtcgtccgcgaagcggaaggccgctaccggctgacgcgcgaagagcccgtcggcacgggacgcaaaggctatttcgtcctcgaagccagcgaccgccgcaacggggtgcacaacaccttcggactatggagggcgagcatgtccgtggacggcgatccccggttcgaataccgcatggacggcttcacgcacgacctttcgcgctgctgcgacgccgtgagccactaccccatgcagctcacctcgcgcaacgaggtgatccggctggcgcagctggccgaatcgcccgactgcttctatcccgtcatgcgggagcgcggcctcgtccgcaccgccgagggcgagaaacggcgcatccgcatcgaagccgaagacgactgcggcaaccgctcgcagctcgaattcgacattctcggccgcacggaaacgctccgcgccgaagctgacagcacggccgtcgtcctgcggcccgaaaaggcggctttggtccgtgcgggccgcgatctgacggcccgcatccccgcaggagcggtctacgaacccattttctgccgcccggaacagcgtcaagcccccgcatccgactccacggcggcgatcctctcgcccgcctaccgcatcctcggcgccgaaacgcccctgtgccgcccgatgacagtctccgtacacgccttcgtgcccgacgacatgcaatcccgtacggttcttgcgacccgtacggccaaaggacgcatcgcctgcatcggcggcagatacgccgacggcgccgtgacggcgacgacccgcaccacgggcgacatcttcgtcgccgccgacaccataccgccgcgcatccggccgctcttcagcgaaggggccgacctcggcggcgcccgcagcatccgcttccgcgtgagcgacaatttctcaggcatcgcctcctgcacgctgctcatcgacggccgctgggcgccctgcgaccgtttcccgatgcagggtacgctcgtacatgcgttcgaccgccccgccgcaaaaaaacgccgcagcgtacaactctcggtaaccgacggatgcggcaatacagcccgctgggagggaacattttggcggtaaactcttaaattcaggaattattttctatatttgcacacatcccaacaacaaacacaatgacagacaacaatcccgacgtacggaaacccttgattctgatagcggaagatgtcgagagcaactacaagtttctggaaataatactcaaaaaagagtacgatctgctatgggccaagaatggcagggaggctgtcgattttgccatggagcacaagcccgacgcaatactgatggacatcaaaatgcccgtcatggacggcatcgaggcgctgaaggagattcgccgctacacggccgaactgcccgtgatcatgcaaacggcctatgccttcgacaccgaccgccgcactgccgaggaagccggatgcaacggattcatcaccaaacccgtcatgccgcgcgaactgaaaatgtatctggacaaatacctgaacaaataacagagaaagtccgggaacagccgtcgcaaatccgcttcacacccacaccgtctccagcggccggccccgaaaacaggcgccccgcactagactcaaaacaagccggacagaccgtccggcttgtttttacaaggctcagcggcgcttccgcagacgcccggtccggaataaaacgccggccgtccgatgcagataaaacaagaaaacacgaaataaatttgtagatacttcggaatttcgtacttttgcacccgaaaatcgacatggtctcgtagctcagttggatagagcaacagccttctaaactatgggctccggccttcatagatttacacccgggcaagggtttatatctctatatttacttcacatttagcgtattataagattcacaaagtgtgctttttgtatatagcgcagtcttctgatctggtgcgatttcttaaaaagggtcgaaaaataggctattatttgcccaaatgttgtccaaaaatgactcaaaatttttaagagatggctacttttaagacttgtgtattcaaaaatcatctgcgtaaagacggcacgtataatgtgaaattacgtgttacccataatcgaatatcgcgcaaaatcagtacaccctactatgtcgaggcgaagtatgttaccccgaacctcgaaattaccgacaaagaacttctcggattgtgcgaggacctgtgtgctgattgtcgaaaaatatgccgagaattgggatttacgattaatcggatgtcggtcgatgacctggtgcatgttctcgatgtgaaattagccggttccgaagatttccatttggacttttgcaaattttggagggagcaggctgataccctgtcaccaggaactcggcgaaattatattgccgccttgaatgccttccaacggtttatcgggaccgattcattcgatataatgcacatcacatctcgcttgatcagcgaatttatggctttcatcgagcatgagccttcacaacggggatctaatcggaaaaccccgagtaagctgaaagatgcacaaaagtcacgggcaatctcattatatattgcgaatatgaaggccatgtataaccgtgcaaaattgaaatacaatgatgaagattatgggtttattccaatcacgcgagctccgttctcgaaaataaagttaccggagcatgtaccagccaaacgcgctatttcattggaaacattacagcgaataatcgatctgccttatagaccggatacggtaacaggagcaaaacgatataatttggcgaaagattgtttcatcatgtcttttggactgataggtatgaattccgttgatttgtacacttgccaagacattgaagacggtgtactaatctatcaccgcaaaaaaacatgcaccaggcgagcggatcgggccgaaatgcgagtgaaaattgagccgatgattgcaccgttgatggccaagtacaaagaccccttcaaaaaacgaatattcagattctatctcgagtattctaatccggatgctctgaataaggcgataaataaggggttgcagatgatcgctgtcgaattggggttgccggcgctgcaatattatgcagcacgccatgcctgggccacgattgcccgatcacgattgctgaagattgagaaggcaactgtccatgaagcacttaaccacgttgatctgaagatgcgagtaaccgatatgtatattgagaaggattggtctgtaatatgggaagcccatacaaaagtacttgcactcttaaaatggcccgataaatagttacttttttgtccaaaaatgagaaaatggcggtcttgaagttacttttttgtccaaaacaagttacttttttgtccaaaagtagggtttggaagttacttttttgtccacggataccttatatctatttatcaaagaatttatctttgataaattcactatacaacctgataaattatataacaactgatgaataggccaacaaaagttactcgcgcgcgcgaggagaaaggttttgttgctcattgtaacctcaatattgggcgaaatttggctaatattacgggaaattgttgaaaagtgaagggaagagctcaaaattgactccaacacgagttacttttttgtccaaaaaaattgagacacaaattttcgatccccaaaaatggttgcggaagttacttttttgtccaaaaaattattggcaaaaaaagaaaacccagaccgaagtccgggttacaatgaagagttattctcaactgaagataatctcttcccttcaaagcaaatgtacggaaaggaaatggtttctgcaaatcctatttccttgtgattaatcacaaagaaataaaaaactgccgaaaacacccctctaccccatatttgtacgttgtcagaaaaaagagagcgatcttcatatagcatgaaaatcgcccgtcgtgaagtgatctcggcgcggctcgaacgcgcggccggcagattagaaatctgctgctctatccaactgagctacgagaccatcgtttaataaacgctgcaaaattaagaaatttcaatgcaactgcaaacttattctttgtgattaatcacaaaaaatagcagcagatcgacttatactgttaatttcttcccttcacaattcaacatcaggcccggagcaaacctccggggctttttcaataatattgatattacggaatcaatcggttccatccatagccggctgccggcggatcatcggccatatcgccgtgcggatctacgatcccgatgcacggcattcgagccccctgaactcgcgcagctcggcgaccatgccgccgggcccagctcgcggacgccttcactcgacaggctcgctcatcgtccgggggagagcggtagagctcactcacaacaggacgcaaagatagccgaagtcgcggtgacaacggtacggacgacaggccgcaggagcctgccgcacaagcgtccggtgcaaataatttgtccgcttcgcccgtcggcgagccgtcggcaaatttttcttccggctcctacctgatgtctccgcgaccggctgcgctcgcatcgctgtcccgagcgtttcggcagcattagaactccggcgcaggaggataaagtctgcaaacaagttatggataacgagcgtttaattcggattctcacgaagaaattgcgtgacaagtacaatttaacgtattggcccttgcggttggatgtcgaaaacgccgtcaatgaagccttacagcaaacggacgaactggataatctcctgatccagttgcgtacccgggccgtgaggttcagttaccgcaaacaggacgggacattccgggaggctttcgggacactgaagccctgtctgccggaagagtaccgggccggaagtaaatctcgcagccgttcgacaaacgactgtgtgcattacttcgaccttgagcggaatgcctggcgttgcttctgtccagagaatttcatcacggttcacgagcttccgtaactcgtcgccccggagttttcactccggggcttttttctgttccgttcaccagcaagggaaaaatttacgattcatcacaaagaatactgcgtcgatacggccgccggctgcccggcagccttcgcctgccatcggggcgatccgactccccttcctgaactggcgccgcccggcgaggatgccgccggggcccgcttgcgtccggcttcgtccggcaagctcccttgccgtccgggagagagcggtcgcctcactcacaacaggacgcaaagttagccgaattcgcgccgacagcggcaaggatcgaccgcaactggagcgcttcgtccgcccgtgggcatggtgcggaaatattccatttcagatactccctctttttgctcgtatgtcataccatgccccgcgtgcggggcattggtcgctcctaaaacgtgcgacttgcaggtcgttgcaagtcccccgtttctccacgtcgcggcagggcacccctcgctacgctcgggagagcggtattttctctctgggtccgaccatgctgcgggtttagggactcctgctgttttcaggatttcgccacttgcggtctcaccccttacacgttgccttcaggccatatctgatacaaaggtcgatcggcggattttgccggccaatgaacctgccaattattttcctgcggcccttcgggtgaaaaaattaaccccggctttgccggggcaccctgaagtaattttttcaaaaataattgtcagaacccttgttgtgccggtttataggtattgatctgccgcctatgcccattccaaaggaacgggcggcagatcgtgtttattacaaaatcgcaccgatcggaaccagtatcagaaaggctatgaaggcaacgtgtaaggggatgatccctcgttctttgaaatcttgaaaacatccatcgtccggcaacccgcagcctggcgaaccttcgagaaaatgaagttgttcgatagaaaggataaagggcgtgacgaggatgttagcaaaacggcaacaaacaatttaatactaaaacaatacaactatgaaagcaatcagaattttttttgagcgcattgcgaaaatgatctttaccccggatggatatgtagtagatatctgtctttttaagcaaagagacacttgggaatcgaggtggttctcggtgaaattttcgaatcggaaagccgcgaaacaatggatgcaaaaagttatcgatcgatttgaaaatcatcccgcatatccgttgaatatggtccttttggtcgcagtttataccaaatgtcaacttaatgaggtgctcgacgatcattattgcgtagtgcctgactgttaatttcaatcaattataatccgccaattatgattaaacgacacactaccaacgaattttacattaaacctctttataacggctattacgctgtcatagacggatatgacaaatctatggcatcgctcgaatgtagtaaggaagccgctgaaaaatgcgccaaggaactcaatgagatgcgcaacaaacgtttgaaacttaaataatttcgcctctatgtcaaatttcaaccaacaacacgccgcggattttgcaaaatggcgaatccgccacccgcacgaggtggtcaatacccccgaggaagccgggattacctcgactctcaaagtcggtgacaaggtgactttcacgaaccaatacggcgtgaaatttccgggccatcgggttctcggcttctgcaaacctactcttggcaatcggtgtgtgtatctcgatattgattgctattggttcccggtgggccttgatgaactcaaacttgaaaagtaattgaaattatcgtaaattagaggcgcagtgcctcgcagaacctcacgatgtacaggccaatcgtaatttttcagatgaaacaaactactattgtcggcaacatcggccgggatgccgtatgccgcgagggcgacggcggtcacaaattcgtatcattcagtgtcgcgtatgccgaacgcaagacgggtgaaacggacgagcaggggaatccggcaacggttgctctgtgggcggagtgcgaaatctacgtcggcccggaaagttctgccgaggggcttctgaaactgctgaccaaagggcgattcatttatatcgaagccgaaggcaaggtagaagcgtggattgataagaataaccaactgcgatcgaggattctctaccgggtgacgagttttcaggtctgaccttacgaacatcgacggccattgcgccgtcgatgttttcacagtctatctatttcggtgaaaaatttgctatatttgcacctatgagaaaggaattgggtaaatggttcatggatattgccaaatatcttctaacggcagttgtcgttggggccttaattaatgatatagagaattcgcgatggcttgtttatgtcggagggatcggggcgacattgagttgcttgtttattggcttggggttacttcggcagaaagaagcaaataaaacacaggaggaataagtatggcggcattttggatttttatttttattattgcttttgcagtggcaatattaatttggagtaagacagataagggaaagaaatggctcttgtaatttcttcccttcacctatcaacatcgcgtcccggctggttctaaccagccgggacgcttgtttttcgcgccgcgccttgggggcgcggttgctgggagcctgatagaatattatttcggttagaaatttgcatatgacacaataagtacgtatatttgtacgtatttaggtacaaaatataaagttgagcaatgagaacagcaaactattccgatttaaggcagaatctcaaaacctatatagattctgttatcgaggattcggatacggttatcattaaccgcggcgggggagccggggtcgtgttgatgtctttggatgaatataactccatcaaggaaaccgagtatcttatgaaatcccccgagaatgtgaagcgtatcaaagctgccgagcaggagatccgcgacggcaaaggaaaggttatcgctcctgaagatatatggaaatagtcttttcggaacaagcgcaggcggacatcgctttttggaagaaaagcggcaacaaggcgattatgaatcgtatatccgcattactggcggatatagcggaacatccgttcaccggtatcggtaagccagaacccctgaagtatgatctggccgggaagtggtctcggcgtatcaatactgaacatcgcatcgtttactcggtgcacgatgaaatgatcgaggtctatatcctctcgatgcgttatcattacagtaagtaatattttcttcccttcactcatcaacatcgcgtcccggctggttctaaccagccgggacgcttgttttcgcgccgcgccttgggggcgcggttctcacggagtttgcggatgctgatattatttattattatacggggaataatattcgggtggaagcggaaccggccatagccggctgccggatccccggctatgtcgccgcgcggatctgtgatccccatgcgcggccatgcgccccctgaactcgcgcctccgggcgacgatgccgcccggcccgctcgcgtccgccgtcgctcgacaagcgaactcggcggccgggggagagcggtcgcctcactcacaacacgacgcaaagttagccgaagtcgcggagacagcggcaaggatcggcctcggcatcatgccgaggccgcccgcgtgcacgctgcggaaatattgatccgcgcgcagcgccctccggctgcgccgtcggtaaatatttccttgcgtgtccttgcctatggtgcagtctccgcgaccggctggtagccgcatcgctgttccgagtgtttcggcagtgtaaagctccggcgcaggagtataaagtctgcaacaaatcaatgggacattcacaggttctcgaaaaggtctcggcgcacatcgccgagctgctggtcttgaaaatcgaatccatgactcaaacgtggcaaaagccgtggttctacggccagggcctccttccctgcaacatcacgggtaagaggtatgccggcacgaaccttttgacgctgctcatgcttacggaagtcaagggttaccggactccggtattcctgacctttcgtcaggccaaagaacgcggcctgacggtcaggaagggctccaaacagttcccggtggtattctggaaacctttttaccaggcgaataatccgaccgacggtcagcgccggtatcttacggtcgaggaatacaacgccttgcccgaaagcgcccgcgccgagtatgtactgcgcttcagtttacgctattatccggttctgaacctcgatcagacggatttcgaggagcgcttcccggaacagtggcagaagctcctggagcgtcagtcgatgacgccacgtccgtcggggagcgtgcaccccgtacttgagcggctgcttgccgcgcagtcgtgggtctgcccgatcctccagaagtcgggagatgcagccttctactctccctgtgacgataggatcgtcctgccgcgccaggagcagtttcacgacctggaagccttctactcgaccatgctgcacgaaatggcccactcgaccggctcggcgggccgtctcgaccgccatttgggcgagccgtcgacggcggcttacggccgcgaggagttggtcgcagagttctcggcggccctggttggcctcggcctgggcgtgtcgagcggcattcgggccgagaacgtagcttacctgaaggcttggctgagggagctgcgcgagaaaccggcctttatcttctcggtattgagcgacgtgcagcaggtcgttcgcttcttcgaagaagagctgtgcatgaggcttttcgatacggctccggccgagaatggggcataggggcttcggccccttttgtcgcgggctttctttcggcgccggcgttcgccggcgccttgatcgctcctaaaaagcacgacttgcagggcgttgcaagtcgcgcttttctccacgtcgcggcagtgcacccctcgcgttgcgagggagagcggtattttctctctgggtctgaccgggctgtggttttacccggcctctgtcagaattcaagctttctgcgacctgaagggtcaccccttacacgttgccttcaggccattctgatacaaagtagtgaccctgcattttgccgggcaatgaacccgtgaaatattttcttaggcgtcccttcgggagctgtgtttatgatgaaaaaatttaccccggcaggccggggcactctgaagaaattttttcaaaaatatttcccggaacccttgcgccggttcagcggtagagagcggccgcctatgcccattccagaggagcgggcggccgctccatgttcattacaaaatgtcagcgtcccatacgagtatcagaaaggctctgaaggcaacgtgtaaggggatgaccctcgttctttgaaatcttgaaaacatccgtcggcagggaaatcacagcccggcaaaccttcgagaaaatgatagttcgatagaaaggataaagggcgtgacgaggatgttagcgagttttcgacaacaagttctttgacgtattaaccagctccgctcgatgtggtcggcggatggcggggagcgaagccccagcggagcgcaaatacaaacatttaaaattttaatgctatggaaatatcactggatgattatttagggcaacgagggctgaggtctccgataagtgggtacatggatgacaaatggcgaaacatgcgcttaacggctcgggggcaaaaaagattcgagaaagaggcggaggctgcaattattgaatacagcaagctacgcaaagccgccatagacgaatataacaatttggtgaaatcgggcgagataatcccgccgcatgaaacgaaattggaagccctcttgagtgtggccagaggacacccggataacgaaggaacacaagcagcccgtaggttgctgaaaaaaagatatggtataatatcctggtaatatgccgcataattcaaattcttaaaaaattacagctatgaaaaacgattctaacaatgcagcaaaacaaatgattgcccggtatcctgacctgaaaccgtacccgaagagtgccgcggagaatctgcgccgcgaattgcgggccgtatttccgcaaattacattctcggttcgttataaatctttttccggaggtgatgagataacagtatcatatgaagacgggccaaaggttgaagaggtcgaggcgatcgctaataaatacgcctatgattcgagtcaatgcgatgctatgaccgattattacgattaccgtccaacggaattcacccgaatttttggcggtgcaaagtttgtgctgattcgccgagatatgagcgatcgtgtacgtgccgatctgtgttgcaaagcggtagagatcgctccggatctggccgacggtagaaacgtacggcgcgaagagctttttagtcctggcgaaatgtgtgccagtgtcgaattatttgaggctactcgcgggttgtgctgggtttcagccgattcgatagcccgtaatttattcaacaaaatgagttttgcgtaggtaaggcagagattattttacgattcgaaaaccggagcgggcgacgtcccgctccctaaatcaaacgattatggcacaggtagcattattaacgaaaggcatcgtttacgacacgtccagacaggtcgtgacattgcaccaggtggtcgaacgcttcatgcttggggactctctttgtgagaagtgcatcgtcaccgaaatcatgttcgacgagcatgccggctatacctacacgctgatcgggctcaagtcgctccggaacttccgcacgcatttcatcttcgatgaacacgagtcggccagcggattcttcgcggatctcgcttacccgaccttcttggcggccgaacaggtcgaagaggtcattgcccgtgcggcggccgccgagaagcagcgccgcgaggaagcagctatcgcccagcggcgtttgcatcgcggggctcttgtcgtagactattcagcgaaggccctggccatctttaccgacgaaccttccgatgtgttggttctggagcgtatcaaggccaagcgcaactccagtctgacttatcagggccgcaaggtcgccggctggatcttcccgaaataccgtcaggcccaactggcggccgtcatgtcgttgtaattaaattctgcaaattatgaaagtaggtacgaaaagcctcctgttcggagcacataacatctttatccatccttttctggtcttcatcgcttggtggcggttgtacggattcccggctgatccccggctctgggttgcgtttatcgtccatgactggggctatctgggcaagccgaacatggacggcccggaaggcgaaacgcatgtcgagctgggggctcggatcatgcggatcttcggccgacgctgggaagagttcacgcggcatcattcccggttccactcccgacgggacgatgctcggccctcgcggttgtgctatgccgacaagctcgccctgtgttgcgaatgggagtggttctacctgtttcggacgcggatcacgggtgagctcaaggagtacatggcgctttcggccaacggcaagtatagctgtaaggagtatatgaaccgctcgatcgagacgccgcagtcgtggtatagggcggtcaagagtttcaccttgcgctacgtcgcacaaaactaccggtatggacatcgttaagaccatcacgacgaagatccggcggcataacttcacgttccgcgaaggccgccggatctactacggcctgcaaatggatacgacccgtctggtctggtctcggaacctctgcgaaggctggcagatcgacatcgacgggcggcggatcaccgtcgattgcgtccttcgggaaatcacgatcggcaatggcgaaatcatcaactactgacaccttgcggcgtacaggtcagccgctattttttactatgcgaacgattgttataacacacgacggattttggtatacgatcgaagattggaattttgcccgatggaaattgtatgagagtacgcaaggccgttattattgcgacatgcatggaattaaagtcacctttgaaagtgtggagcattttctggaactcatgtatggccatagccgggtcggggagtttgtcaactatgaaatcaaaatcaaggagtccggacggtaacgatttttgtttttcttcccttcactattcaacacggcagcccggccatcacggccgggctgccgatttctcctgtttaaaaaaagctatcccaatgaattcaaacgataaaatccgacttttgtacatcgaccttttctgcggtgcgggcggcacctcgaccggggtacaccttgcgcggcacggcggagatccttgcgccaaggtgatcgcctgcgtgaaccacgacgccaacgccatcgcttcgcacgctgccaaccaccccgatgcgctgcactacacggaggacatccgtacgctggagttggggccactcgcggcccatgcggcccggatgcgccgccagtatccggatgccttcgtcgtcctctgggcctcgctggagtgtacgaacttctcgcgggccaaaggcggccttccgcgcgacgctgatagccgcacgctggccgaacacctgttccgctacatcgaggcgctgaaccccgattacatccagatcgagaacgtggaggagtttatgtcgtggggtgatctggacgagcggggcaagcccgtcagcagggatgccgggcgactgtaccggaaatggatcgacaacgtgcggggctacgggtacgacttcggccaccgcatcctgaacgccgccgacttcggggcgtacacttcccgccggcggttcttcgggatcttcgcccgccgcggccttccgatcgtctttccgaaaccgactcacaccaagaacccggcacagggcgacctgttcggtcagcagcttcgcaagtggcggccagtccgggaagtcctcgaccttgaggacgagggcgagtcgatcttcgaccggaagcggccgctggtcgaggcatcgcttgcccgcatccacgcggggctggtgaagttcctcgccggcgggcgcgaagcgttcctcgtcaaatacaactcgatgaaccactccgggaagtatgttgcacccggcatcgacgaaccgtgcccgaccgtggcgacgcagaaccgcctcggcgtagccaaggtgtactacctctgcaagcacttcggcgggtctccggaggggaaatgcacagccgtcgatgcgcccgcgggcgcgatcacctgccgcgatcaccacgccttcgtctcggcctactacggcaacgggttcaactcgtcgatcgagcggccgtcaccgacggttacgacgaaagaccgttttcaactggtgcgtccgttcttcgccaactactattccggcggcggccagacgtcaggaacggacggcccggctccggccgtcatgacgaacccgaagcagcggctcgtcacgccgtggatcatgaacaccaacttcagcaacgtcggcagttcgctcgatgctccggcccagaccgcgactgccaaccgcaaatggcaatacctgatgaacccgcagttcgcctcggcgggtgccgctaccgatcggccgtgtttcacgctgattgcccggatggacaagcggcctccgcggctggtgacggccgtagcggacggcgaggcgctgccctcgttcatcaggctggaggacgaaacgttggtttacgagatttacccggaagatacgccgatgctggtgcagataaaggagttcatggcgctgtacggactggtggacatccggatgcggatgcttcgtatcccggaactgaagcggatcatgggcttcccggagaactacgtactgatcggcacgcaggaagagcagaaaaaatttatcggcaacgccgtcgaagtgaacatggcgcgggttctctgcgaggcgctggtggcgaaactttacgagttgaacatcgtgccgcagcgctttgcggcgtaaaatttgttttcttcccttcacatatcaacatcccggccggagcctcatggcccggccggaatttattatgggggatgttgtttttgtcggtatatctgagccgacaggtgaccgggttggatcgttatagactgcgcggccatcgcgtcgggtcaggtatgcccgacgactcgctacgctcgcatgcgcgatggtcgcttagagcggttttgctcgacattatgccccggcatgcgcaagctgccggggcatttttgtgttgtccgcatgcgtctccttttggaaccgggccaaaaggagcaaaagtgtactgcaccccaaaagttggacacttttggggtgttttttatgaaatataattatgagattcgtttaaaggccgtaaaactggtactcgaaggcggactttcggttagggaagccggatgtcacttgggctgtggccgctcgcaagttcacttgtgggtaacattattcgagcgccatggccttgccggccttaagctgcgccacggtagctacagtgcagaatttaagttgtcagttttgaagcatatgcaccaaaatcatctatctttgctggagacagcagtgcatttcggcattccgggcccttttgttattcgtcaatgggagcggctctatcaaaaccaaggtgctgaaggcctgcggcgtaaaccgcaaagaaggaggccggccatgagtaaatcgaagactaaaaaagtcaaactcaaaacgactccgcacgaagagttgcttaaggaactggagtatcttcgtgccgagaatgcttacttaaaaaaattgcaggccttagtcgaggagcgcattgtccgcgagagcgggaaagagcccaagccatcgaaggactaaggccgcagtgccggctttcagtattgctcaaagccgcagggatggcgcgaagcacattttattatcacttcagaaaatcaaaacaacccgataaatatgctcgcgaaaaagagagtattataaggttatatcacgaacataaggggcgttatggttatcggcgcattaccgttgaaatgaataagatcggatatgcgataaatcacaaaaccgtacttaagctgatgaatatttgcgggataaaaagtcaggtcaggctccgtaaatactgttcatacaaaggacagatcggacggatagcgcccaatcttctgcaacgcgactttgcagccgaaaaaccgaatcagaagtgggttactgaccttacggaattttcggtttgcggcgtaaagttatatctatcgccgattatggacttatataaccgggagattattagctataaaatagctgaacgccctaactttatgcagatcatgaagatgctggacgatgcgtttgccagaataccggattctccgggtattgtcttgcattccgaccagggctggcagtatcagatgaagcagtatcagctccgtttaagacagaaaggtattacacagagcatgtcgcgcaagggtaactgtctggataacgctgctatggaaagtttctttggattattgaagtccgaattattatatttgcaaaaattctcatccatagaccatttccgaaaagaattggaagaatatatcgactactacaataacaagcggataaagaaatacttaaacaacatgagcccggtacaataccgaactcatgccatctaaacaaatactaatccgtccaatatttggggtgcacttcaaaccgcgtccgctttctttgtcttgaagacacaaagaaaccggaacccaagaaaagtcactcaccccgtttcttgggcaggtagcggcaatgcccgctacgtgcccaagtcctcggcgcaaagccggcgcggccttccggcccaaggcttcgccgcgtgtctgcggacgcagccgaggcgtgtttcgcaacccggattcggtgaatagcttcggttttatctttcttcccttcactattcaacaccccgcctcggcggggcgggcaccggaaaactccgctttgcggagattttcggtgccgcgatttgcgccttcgacaagctcggcgcaaattataggtatttgtctgtacgccgccatgcgctccgccggagcctcgctttggcggctgacaaagcccccctttctcccccgaatgggggattccttctttcgtgaagaaagaagcaaagggcggacaaaatcgacgggggccgattttgtccgcgggcggctatttgccgcccacccggctacgccggagatcggtaaaaaaatgttaccggcatctaaaattccgggcggttattcccgcccgatgccttacggacatccggatttcaacggacgaaggcgcgattacgcaagcgcaatctgacccgaagaggggcattacgccttgcccctcttcgggtcgcctttacgtccgccgaattccggctgatcctgtaacatttttctgtgaacaagcgggaatcacgctgaagcgtgattctgttttattgagcgaatgtgtaatttattgataatctgttgtatatgtaattctgttttgtggcttatcatgcaattttggttacatttacgtgacttcaatgatgtatatgccagattattagtgttatatatgtaacatgctgcgtaactttggcaggattaggcaagtttatcttgcggtgtaaaaaattcttgaaaaaattatttctcactcccaaataaacgtagccccgatattcaatttcttgtgattaatcacatgaaaatcagttcttgctacctctttctataatccttttctttgctcatgctacaaagaaaataataggaataatgaaagcgaaagttgataaaccaacctcatgcactgttcgcatttctaaggcggccaaaggcaaattagagataatcgcagaacgtaaaggtgtatcattggggaatgcggtatcgcttatcatcttgcattatgcggccaataacctggactatgaagtttcggttaatgatgcatacaaaaccattctcaataaacttacaggagttgatataaaattttccaagattattggtcctgttgaacgtaccgaagattttatcaaaagtttggtgcgcgaagatcgccgcagtgcttccggatcattctccggcgcttctcaggatatggatgctcccgatgttcccgctccctcttccgacgatcgtttgcctcgctcgttcggactcttggagcgtctcttttccgctgccaccagtacgacggattttgaaggtcatgccgccatgcagatccgtttgtcgcaatctgatttcaaccagctcaaacgcgaatacgaggaattatgtacgtcacgcagtatgtagacaacacccgctacggtcagagttccgttgccgaatacgcgggttatcttgagaaagagagccttatccaatcacagttggatgagacctcctcccgccagttgtctgcatacttggacaagcagaacgatgtggtccgggtcgaaggccgagagtatttcttcaacggcacgggcaatacctacgatacggaggatgtcgtgaagaacatcgatgcgaatgtccgcgggctgaagaagaaggaagcccgctattatacattctcgatctctccctcgaaggacgaaatcgcccatttgcgccgtacgatcgccgacacgaagcagacgctcctcgaagctggtgaggcgatccctgcgaggctggaggatgatatgatgcgaaattatctgaaggattatgccatacagtgcatggatgcctatgctcgtaacttcggacaccctgagatccacgacaaccgggacctgatgtggttcgggatggttgagaaggaccgttactggaagagccatgatccccatgtgcgtaacaattcccggatcgacaaggagatcgcccgtctggaaaagcaactcggcggtggaaaggatgattccgtgcaacgccggattgcagatctcgaagcgcaatatgttcgggaaagccatgtccgccttggcgggcgtgacgagattctgcgggctatgatgccgaaagccggtgacaactggcatattcacgtcacggtgagccgtcgtgacatcaccaattcgatcaacctgagccccaatgcgaacggtcgtgggagcaagaaacacgttctgaacggcaaggccgttcgcatcggctttgaccgcgaagcgtacaagatcgaatgcgagcgtcttttcgaccggttcttcgcacaccatcggttgcagaccgagagctatgaggtatccaagcgccttcggcatatgtccggattcgcctttgaaaagcagttggctcaagaccgtgcgactcgccgggcggaggccgcggagttccggcagctggtgagcggcggctatggggagtactacgaatccttgcttcaggccgagcggctggatgcacggcagttgatgcgtctgaaggggcagttggtccgtcagcttcgtctgctgaatccagtgttggatgcaaccgctctgatggattcgagtgtcgaggagttgcaggaggaattgaatcgtgttactatggatcaagacctttcgcttccgcactggggccaaagtctgggtgtcggcctcggagacaaggctgtcgaggtttcgggtctacggggataccatccggtccggactgcgcataaggtcctgcgcaaaggattggccatgcgccaggctgtcgatcgccgtcgggacgtctttgatcagtggtcggagatttaccggaatgcttggcatcgggaaaactatgtatttgacagtattgctacccgtcgcaatactgactgcctgttcgcgcagacggagtatctggaagaggtatttgagggcgattcggtacttctggaaaatgccgtccgttacctgacggataccgagcggcagttggttggggaatatgtacagtgtttttggcctgagcgccagcgtgagattctgacatcctttgcccgtgagacctttggggccgacggcgcgtatgtcaaagacatgaaggatttcgagagcatggtccgggagcggttgcttccggaagatgcccggcgctgcgttgcggaagccgtaagccgttgtgagcaacctgcgaccttcgatgcgctgcgccttgagatcgcagcctgtcctgcggaccgtgcggcggagttgaccgtgcagctggagaatttccagaccgagcggatgcaactcatggagcagctacgcagcgtgctggcggagcaaacgctgggcgttcacgccaaagaggagtcgttgctgcgcttggcgcttcaggaccgtaatgtggacaaggctttgcgggaccttcgggcgggagtagtgaagatctacgaaaagaagcacccggaactgaagccccggcagctccagaagcagttgaaggagttgttcgcggaactctccaagatccgcgtgaagcatcaggcggattttgccaaaaccatcgacacgtttattcgtgaagaactaccgggttatcaccttctcatcgagaagcaaacccaacttgaacaactgatccgggagacgactctcgatcccaataaatgtgctgagcgaattcttgagatgaataatgaactggcccgcgaggtatcgccccatgcggagcgtctcttcgagcagcatagccggctgttgttcgggccggaagtccggttgcgtaacgagcatgacttttcggtgtatgtggatcagaattattctccggagcaggcccgtcactacaaggactccctgaagggtgtatatgcccggatcgaggaaaagcgccgggaggttattcagcgtcttgtccaggcaatcccccaagaggacttggagaagatacagcggcagcagaactatcttaaccgctacatcaacaaatatttctcggctgcggaatccaagacgaagaaagaggctttgcagcggcgtgtatcctcttcgtgccgtcgtgctgtgggtccggttccggaatataaggtttacggagccgttgctcagcgcgatgtgtcggtgcaggctatggcgaaggccgatcaggtgaagatggtgcagccggtcactccgcagcagttggcgataaaggcggcgttcaaactcgttggaattttaaccaaaggatattgatatgaatgaacttcattttacgatgaaattggccctgaaactttttgccggattgatcctgctgggcgtctggcttatggcacgtcagcaggcgaaactggataaacggaacagtgaagcccgtgccgaagcgagagagcaaggtttgccggaacctccgcgagagattattccgcgctccaccctgattattgccggcgtggcgatcctgttcctgattatagtcttgttctggggaaacgagtctacgttatgacaaagttcagtaacagagattccgacctttggccgcggattgaaatggtagtccgatggtcatgtatgtcggttaacgcctttgctcggcatatcgggcttccgcgtggtgagaacctctatcagataaagagagggaataacgggctttccatccatgtcgccgacatgatttgtgaaaagtttcctgagatcgatgaattgtggcttctgacgggcagaaacaatatgtttctctcaatggataagtgccgttgccgcgaagtcgcgccgggccccatgtattctgcgacgtcaggaccggttgatccttgccgactatgtatcgccgggagaattctgcccgtgttgctccagaaggaagtgtgcaaccccgtcggcatggccttccgatatacggaggatttgatttcaaaataccaaaacatcgaatgattatgactctgttgggatggttcctgttgacggcggtgttgatcccgctgctttatctctggcgacgccctgccggaatcatggccggccttgcggggcttctggttccgggaggactctacctttgggcgggtctttcactgcggacctacacatggtcatgggcgttgccgttgctggcggggcaatgcctgctcattccccttgtgcggtttctgtatgtccggatttgccggcttctgaacggctggtccaagttcaacttggagatcgaagatagcaatggccacctgcactatgtgaaaggtatcaatcagggaacctatatcaacggcggttcgggcagcggtaagacagcgagttgcaatacggcctatgcccgacatgcagcacaattcggtatgtcagtcttggttcacgacctaaaaaaatatgaactttcggaggttctttatccgatcttccgggctgctgggcttccataccatgtttttgcgctgttcgatcccgaacgttctgtgcgtatcaatccgatctccccggagtatattcccgacgaggcatcgctgcgctcgcgcgtgaagtcctttatcgttgccgtgcagggccgggagtccgacgactcgacttctgatttcttcaacaattcggcctcgtcgcttttggaggcgctgatctggtatctgaaacgttatgctcctgagcactgcaacctcccgttcgtgatgtcgatacttaacaacccggagcacctgcggttggaggaaggtcggaaggttcttcctttcgggaagctggagcgccttctcaaagccgatgcgcaggtctattcgatggctgccgcgttcttccaaggcacaggcaatgccgacactacgagcaacatcctccagacgcttattcttgcgttgaacacgatcaatacggatgcgggtttctatttgttgagtgataacgagatcaatctgcgtatcaatactccgggatcgaagatcggccttggactggtgaatgatccacgaaacacgacggcctatgctccgatccttgcgatgatcgccgatgccacgcttacgatgatgagcgaacggggcggagttcccgccgtagccttgctggatgaggctccggagctcccgctgctgcgtgtgcagaactatatggctacgctgcgtagcttgggaatctgtattgtctatacgacgcaggatcttagccagatacagcggactcagggcggcaaggagtataaccagcgtactgttctttcgaacttggcgcatcagttccttgggcgcacgagcctcgaacatactgccaagtattacgaaggcatgatgccgcaggttgatcgcatcgagcgcagttacagcacctcttcgaacggttcgagtaccacacggcgtaaggtgaaacgtcccctgtacgaacgctcggagttctattcgctcaaacaaggtgaattcatctacttccacggccgggtcgagcgtttccggttcaagtactatccgggttccaaactcctacctccgcaagtccgggatttggacccggtgcaaatgcggctcgttgccgagcagatccggtgtgatgctgcagaatttatgaacagattttccaatatatgatttcaactatgaaaaaacgactttttacggctgccgcaaccttgcttgccgcacctcttttcgcccagacgatcagctgggacctgtcgcctgttacggcatcgcttcgcacgttggttcccaatctgttgggtctgctatgctttgtggccttattcggctggacgatctggaaccttgttcagaactggaaagatcgtgctgagatcctttccaatgccggctgggctctggtgattattgccgtcggctatggtatggtgtacggtgcgatgaatgttttgctgcgatgaagttgtatgtcaatcgccgtatccgggacaaggcgatggtgttggggcttcctgccgagaacttccttatctgtctgggcctgacatgtgcccctgtgcttatcgtggtgtttcttccggtgtttatcatcgtatggattccgtgggcatgcggggtctattggcttttccgcaatatggagcgtctgaaacgtaacctgcattacggaaaacaatatccccttcatcttaaaaaccgctgatgatgtttcatgctatcttgattctgctggtatcgatcgtcggacttgtcgtctggctgttgttccagtcgtatccccgcccgaagtcccgtagcttcaatgcttcggagcttctggaggacgtttccaataatcggctgttgaccattcagggcgatgtcgccttctgttatcggttgcagcttccagaggttcgatcgttgtccgaggatcaatacgaccgcttgaatgagatatggcgtgtcgccctaaaggatcttccgcaggggacgatcatcttgcgtagtgatcggtacgaccggcagttgttcgacgcctcggcgatgccggaaaactcgtacatacagcgtgaggagaaggcatttgccgcgggacgtatgcagacgtgcgacatgtcctgcctgttcgtcgtgtttacgggcttccgtgcgacgcgcgatccgcggtctcagaatccctttgtaccgctgactcacgccgcgttctgttccgaggatcaagagtacgggcgctttacccgtgcagttgattcgatgtaccttcagtttcaaggctctgggattatcggcattgagccgttcggggaggaggaggttcgtgaatatacccgttatttcttcaatggatttcagaccgactacctgacggatgtggatgctgcggggtgcgatttccgtgtcggcgaccgttatgtcggcgccgtgagcctcgaacacgagcgtcagttcccggaggttctgactacaccagcgccgggtcagagttcgcaactcccgatggggatcatggaagagctgggcatcctgttgcctgttccgcatctgtataatcagattatacggatatcggggcatgagcaggagtatgcgctcgtcaaacagacgttggatactttccgcaagaaccggggattctcggaagagaatgatgaccaggtgcggcgtctggaccgcacgcgcgaagaaatcagcgacgatttggacgccatgttggtccgggggcatacgaatatcatcttctggggtgagagtgctgaagaggtaaaagagtaccggacgcgaataacgaattatttgaggcaggtccgtgatttcgagccttcggtgccgatgggtgcggagcttcgcaatatcgtcttctgctcacatcctgcaacggtaacctgcatggaccgggattcgttctacttggttgatcttcggcaggcgttggctctgtttcagcatacgggaagttacaggtcggatgcggaaggcgtttttttcagtgatcctatcaaccatctgccgttgcgctacgatctctacgatccacatcggaaatatgtcgattcccgcaatattgcggtgataggccgtacaggtggcggcaagacagtcgatctggagaagattgtcggagactaccacaatgaccccgaggcggaatatgtgaacatcatcatcgactgcggcggctcgtatgacaaggccgcccggctgtatgattctgaggaggttttcatcttccgttataacagcagcgatcccctggggctcgatccgtttgccgttgccgacgtcgataatggtgagagtgtggacgacatttgtgagacgctgtggcttatcattaagccgggaggtattcccacggccgaggaagaggtgtcgctgcgcaagatcgtcatgtcgtacctgcatattgtcgcggccccctcttggccgggattctacgtatggctgcgcgataactaccaccagattctcgaaaagaacgagatacgcagtgcttatttcgacgtgagccagtttgttcacaacggcagcgagtggtgcgagggcggcagctatgggaatgtttttgcacgcagcgaagaccctacgacacgtttgaaggggaaacggctgctgatcttcgaattggagaatatccgctcgaaaccccagttgttgagtatcgtcgtacacctgatcggcatcaccatccggacgcttgtctgggagcagatgggtaagcgaggcttcattatttacgaggagtttgccgagttgatgcagaagccggtgatcttcggtgccgtgctgtaccagatgcaggcgatccgtaagaaaggcggttcggcgtgtatcgttttgcagaacctcgaccagctggcgttgaacgccgaggacaggtataagaaagacggaggagctgccggcgccttgatgaagaacatcgagacggtaatctttctggccggagcagatcccacgggctttgagaaatactcgacgggcttcaccgagcatgaccggcaatgcgttctgtcattgaggaacaacttcaatacgccgcccatgtattcctctttctacatttaccggagtaaaaaatcgaccctgatgagtctttgcataagccctcggacctatctggcattccagaccgagggtgaagtctgtgacgagctcggtcggctgtatgcccaaaccaagtcgatggaacgagccatcgagcaatacgaacggattcacagtgcaaattaatacttctatacttatgaaacgattattcttaatttttgcagttatttgcggaattgctcaggtgcaggcccaaatggttgtgacggctccgtcccttgaagttcaggaggccctgaaccacgtcgagcagatgcagcaggcggttcagacctaccagacgatgatgggcgtgaagcagggcatcgataaaaccgtcgatgccgttgagaaggtcaacagcaagctggctacgatccgcgaggtgcaggagattgccacccgctcggcggcctgcgtcaaaaggattcggcaggtatatgacaagatctcggccatgaaggtagatcggcgctatacgaccaacctgttgtcgttgtgcagccagacgacgcgcgagtgcgtcaacgtcacagcctatggcgcgaagatctttacgagcaatttcctccgtctgagtgacgcggaacgcctgaacgaaacccgacaggtcctcgacaacatcgataagctcttggcccgtgtaaactatatcaatcttcaggcggatgccgtgaagttcaacaaccagttattgaacgcatatttcaagtgatatgaatctggattttttggaccaactggtcatttcccaagcgacgatccctccggtagtgagtcgtatcgcgggcttttttctcttggtgcaagccttgcttatcgtccttcagaagaagaacgatccgcataaggccatctgggaggatattcagggtgtgctgctggccggcctcgtggtgttcctgttcccggaatttatccaattcgccgaactgctggtgaactctacggcacagataacggccaatccgcaaagcatgattgcggatcttatgcaaacgacgcttcttggcgaagaggccgtagaggaagagtccggcggaggctttttttcgtcgataactggcatgttcacgtcgtttatgaatggtggaagcgccaatgtcggctcctttatgattgccgactatattctcaagccgttggccgatattgtcaacgtactgtgctttccgacctatatgttcattcgcgcggcatcgctgaagatcgcctactttgtagcgcctctgatccttgttctgggggctttcgagcctttcagggctttgtggaagcattggtttatgatctatttcgcgttgctgttcgccggccccgcccttgttctggccaacaacttttgtgaagattgtttcgctgtctacatcaacctgacgaattccccgattctcggttttatcatggttgctctggcgcggttcaagatatttcaggccgtattggatctatgttacagaatatttcgagtatagccatgattcctgaaaagatacaatccatgcgccgtaatctggtacgtaataaccttatcacgattctttgccttatgctggttctggtatgttttgtcctgaactacctcgaacggcgtgaggaacgagaggagcgtatgaagtacgcctattatgtagcgaccgacggcgaagtcattccggcccgctacgcccagcggcgggacaatatcgagatcgaaatccgccaccatctgtccatgtttgtcgaggactggtacagtctgacacaatacgattgggaacgtaaggcggaggccgccgggtggctcggaggcaacagcctccgggatgctttcctgacacgccggaagtcgggttttttcaaccgtttcatccagagaaatgtggttcaggaggcgacgatcaaagatttgatgatccactccgcagtagatgggagtttcacctttgagttggttgtggatattcaggagcggatggatgcctactcgcggctgtggagagtcctggccagcgggtcgatccacgttatcgaacgcagctggccgcataatccccacggtcttttgatcgaaccctatctggagaataaaatttttgaagtccatgaataaacgcatgaaaatcctgctgattgcaggtgcggtcatggtgctgctgctcgccgccggctacctgaaacagcaggaccggaacagcgacggttcgcagaacagcgtgacatcaatcgaggccgcaatcgatgataagacttacacgtccaagaaggcggcttatgaggcatatgccaatgaaaaggagagtttctacaaccgtcctccgagcggatttgaacctgtggccgaacaccctgagccgtcggcctccaaatcggagaatgcgcagtccgcaccggtcacgacgctccgggttgatcgaaaagcctcggaggagcagttcgatgccgcctatgaggagattgcgcagaacatggatcagatctatgagggtgaaacgcctgttggccggtcccggcaggccgcgtcgagtgctccggatgggccggcgacgaatgagcaggtggtggatgaggtcacccgtcgtaggcaggccatgatgcgcgattggggagttggccagtcctcacaaccgggacaaggcaattctccgggagcctccatgttccgggccgtgattcacggtacgcagctcgtaaagtccgggcagacggcattgttccggaccaaagaaccgattcgctacggcagcttggtagtcccggccaatacgctgctgtccggagtcgcggcgatctcggaaaacagactttccgtgaagatcaactcggtgcgcatgggccgcgaggtgttctccctgccattggccgtctatgggtcggacgggattcagggaataccgctcaactacgacgaagtagggaagattgccaactcgcagacatccatgacggcggttcaggaggccagcacggccgtgtctcagtacggaggaacggtcggccgggttgtcggatcgatgatctccggagtcggtaaccaagtgcgcagcgccaagaccgtagagataagactgatagacaatcagatcgtaattcttaaaattgacgaaagatgaaaagatatttattcgtgatggccgctttgagcctggcgtttccggcggcggcgcaacaacggatcgagtggcggcgggacaaggtgacgcagatcatcttcccggccgatgttgtgaagtttcgaaccgggtacacctccgatgatgcgatctcgcagagcgacggtcgtgtgatgtatattcagccggtggatacgatgcccgaaacgaacctgaacgtgcagaccgccgacggacgctattacgctttcgatgtggtatataataacgcggcttcggaggtcaactatatcgtatctccgtcgatggccatttatcaggaagagcaactctccgaagatccgcagacagagccccggcccttcagagcggaacagtcggcggtcgtagatgagaccccggtcgaaaggttgactccggagctgctgttcgccaaagtccggaaacaacccgattacatcgtggccaacaatgtggcccggctccagaaactcacgatattgctcaaaggcgtctacgtggacgaagcgcacgtctacttcaaattccgtcttgagaacagtagtaacgttcctttcgacgtcgattatatcgcattctccgtcacggcccgtaagacgaagaagacatcgacgcaggagcgtttgcagatccttcccgtcggggtcgatacgaagattcatcgcgtagatgcaaagtcctcttgtgaggtgatctaccgctttgagaagttcactatcggtaaggagaaaattctgctggccgaggtgcttgagcagggaggtgatcgtaatatcacgctcagaatccctgaagactttatcatcgaggcccgtagactatgagccggcgaaagggattccgggctttctggaaagcagaaggagaattgggccgaacggcactcagggctgccggacacttgttccgggcactttattgtgagataaaaaagttcatacccacttttaagcaaaagagaaatgagaaagaaaatcatgttgtcgatgctggccgttatgacggcaatgaccgtacaggcacagatcggctataagggacaggtgactgcggccatcgatggcggtatcacgcacctcggaggattcgtcggtgctgcacggatcggggcctatctttccccgcattcggtattagggggcggtgtgatgtttgacaagacccgctatgatgccacgctgggagattcgttcgatgcagcgcagtggctcggtgagattcattatcaatatgctgtagcgctgaacaggtttgtgctgctaccgtccggagggcttcttcttgggggtgagagttgcgataggctgtcacgtcagggtaatctgctgccctatcagaaccagttcgtgtacggccttttcgctgaattcggtgtggagtatgtgttcggcaggcattgggcggtagccgtcaaccctcgtttgcaatacctgatgaaaaccaatttcgatagtttgaagttatccgggagcgttggactgaaatattatttctaattggaaagtcgcccgaaaatgctctattcggctttctgagtatgtttttcaggtctttgttggaaaaagaggataacaaatttgttccctgtgtaagaatgattatctttgccgaaaagataaactgagtatgacgttgaatgaagcattttcgagattaattacgcagcaagcctggtacaagaatagcggctatttgaaagaacaggcaatccgtgataaacgtaattttttggcaggcaaaatcattccagaagtacgtataagggagtatttaagggctgccggctgggagcagactcaagaagaacaatgggctgaaaaagatggaaaataaggatatagcataccagctcatcgacaacgatgcggtcagaatgaataacggggacaacatggtcgatgtgtctacggcctatcaggccatagaccgtgcccggtctgatgaacggcatcagttgttggccggctgggagccgacaacgaagccaattccgacgaccgaccttgtggatgtccttttttcagatggtacgatccgcgagattgtaggcgatcatgtaagtaattgggtgtatccatatattaaggtcggatatgctgtggcttggcggctgcgagacggtgatgtgaatggtaatgaaattgaaaaatagaaggcttcttcccttcactattcaacacaatagcccagatggcagaatacgatgatagattgagccttgcggcatatctgaaagcactgatgcggagcttggtcccacgtcatgaggaaaaagaagcgatctgttcaatgctgctggatgagttggtattggaggttgtgcccggtaataaatatacaatggcaaaaggaaaatatacgcgcaaagaggctggaattaaggcttatttggaggttaccggagaggaattaccattgcgtgttacagttgcagaaatacgtgagtattcgaaggcgctgccggaggagcagcgcaagcgctgccacgaattgtatcttcactacatgagtatcggccggcccgagtatcttgaacattattctaatcgctaaccaaacagaagatggacattcaaatcatacagaataaaatttacgagattcgtggccagcgagtcatgttagaccgagatttggctgaattatacggggtgacaaccggtaacctgaataaagccgtgaaacgaaatattgagcgcttcccagaacgtttcatgttccagctcaccgaacatgaattcttgagattccaaaatggaatatcaagttggggcggaacccggaaattaccttatgtctttaccgaacaaggcgtgtcgatgttatcggcggttcttcgcagtccgacagccatacaggtaagcatttcgattatggatgcttttgttgccatgcgtaattacattgtgcaatctacccaagtttcggccgagttgctggagttgcgtagccggttgcagctggtggagcatgactgccgggagaatctggaggctgtgaatgatctgagcgaagacatgcgaaaagacatcgatgcgatttatgaggccattggggcattgtccgtgaagttgccgaagattcagaacccggcacagaaaataggattcaaaaagtaaattatggatattcagatcatacagaataagatctacgagatccgcggccagcgtgtgatgttggacttcgatttggcgaatatgtaccagatcccaacaaaagctctcaagcaggctgtgaaacgtaatatcgaacgtttcccagaggatttcatgtttcaattaacagagaaagagtggcgtgaactggtcacaaattgtgaccggttgccatcgacgataaaacacagttcagttttgccatcagcatttactcaagaaggtgttgcctcattgtctggtgtcctgaagagtcctatagcggtgaatgtatatttgtcgattatgagagcttttgtggccatgcggaactatattatgcaatcctcggtggtcttggccgagcttgccgaattccgcagccggctcctactcgttgaacgtgactgccgggagaacttggaggccatgaacgacttgagcgaagatgtgcggagagatttcgatacagtattcgaggcaatcggggccttgtctgtgaaactaccggaagccaagaagtcacgtcagccgattggctttaaaatcagagaaaaggaataaattaactaaaataacaactgcgtcaaactttaattcctaatactatgaaaaagtatctcaaacttatagcgattggactgctggtcggtagtatgattgcttgtagtaaaaatgaaccggaggaaccctataatccggagtatgaaacggtcctgtcagctaatcttgggaaagtgtggcaatctgaacctgagtttcctcagtatcccggctatttttacttgaatgtggctttcccgaataagttttataatactttcgatgcgattaacgggacattatgtgtccataattacggagaaaaagagttgctgataggtaaggggtacgggaaagatgcaacaagtaaaaatatttattcttctgctatgcagcctggtgatggtattgaccctactgcggattgtcgttacttcgatgatctgagtttcacttgtcaggagggcactttcgatattcgcatggagttcatcacacagcatagtgggtattcgggtgtatattacttatgcacccctaaactccggcttacgatcggtaaagacgcacaggacctttggacggtagcgatgcagattttggaagaataagtttttcattgtgtaaaataagcttagggcgtcggagccatgcaaaccaaccttgccgtggatagatccacgtcgatatcaaccgccgttatcaagaactgatacagtcggacggttatgctattttcgtaatgctgaaaatgccccaatggccaaaggtgctccagtacttctgccccccctccggacggaggatactcgatcttcggctcgatctcagacgcttgcgcagcatgcaggcgatcattcggaactcctgcgaacggcatctgttctatctcgaacacgacaaaacgaagaagcaaatggatctgagccatctggatgcacagccgtcggaacctcgacggaggccccggcttttactccgattccggctccggcagaagcgcttgcggtacccgaacatacggaaaaagccggaccgacgcatcggataaccgtcgaggtcgatccgatgatcgctcttacggccatcggtcttgcgaaaggctattttctgagtatcgtcgaacatatcgaatcgcagagcgggctgcgcatggatgaaatgcgcaaacagcagatgctcgacacgctgaacgaaatatacgagcgctgtatcgaaaagaccgacgtgcgggaggttgcctacctctatctgcggtcggagctttcgggaaaattcagctgaccaagactcggcataaggagaatggcgataagttaaaaacagagtcaggaccgcgcataaaatttgggtgctgctctgcggcggcgatcttgttgggaaacaatgtcgctgcttttttgtgctgataaaggggtatttgacattacggttacgcaaaacaaatgtgtttcggataacttccaaaccgttatcgatgccccgaaattgaaaatcacccctatcagtagtatgtgctgacggggtgattttgttaagattggagttgttggataggctttattttttatacagctccattcgtaagaagttttttaatcgtgagatctatctgtggatcatcgagtagtagaatgtcaaggcttgtgcctctaaagtctattccgtccgatatagttactgtccaatcatagtcctcatattgttcgtcttcataaactacgtactctctatggaaaaaaccatggcccgtaaaacgatctccccagccgcccggtattgggtagaccctgatcttttgttcgttgtttttgaactttagagtcagagtcgtttccagaggtgttaccaacccgttaattaatggaagttcgagagggttgggaggatagtgaccccatgtatacccattaagtccagttataaagtcgaaagctattggagccgtaatctcgaatccggagccgacataatccaatggtgtacttgtgcggattcgtaggcaaaggttaatatctttatagtaagaccctcgtctaatcccttcataagttatatagcagtccggatcgataatcaggtcagcattccatgtgcaatctgttttcgagatggtgttggtcacggtcttggttacgagtatgctgcctgtatcatcgcttacagtgattgtgtaagggagagttccgcttttcagagggacgaaaactatgggaagttgaacttttcctgctgctgtggtttgtcgatataccatgcggtgagtttcttctgacccgctccaagtcttttcagtcgagtcaaaagttgcgttgcgaaggaaaatgccatcgccttccttgcattcgagagcaatattgagtaccgggtgcgattcggtatcctgcacggtaatagtgttcctgttgagcatataggtttggttttgattcgtttccgaggttgtaattgcagcggtttcaaatcggatagtataggaacctgttttattcacgggaaagataccggtaatggaagtttttgttgaagctgtcacttgtccgacagcagtccccgtttcatcatcatagacacctgcaaagtttttgatgactgcttctgtgctattaataacatatcttactgacctgtttgaagctgctgtttcgatgcagatatttttttctgggtctgacgcgtcgatccaaccggcttggggattagttgctgaaagtgtaaaggatgctttgggggaggagcatcgtactgtcgccttgtacccgaagcgtgttgttgcatctacggaggcaagtgtttgatactgattttcggccaccatatattttgcatccatgtgctgttgaatcgttgatgctgtactcaggtatgctgtcgggatataggctctatatttcatggttgcagtagtgccggagatattgccggtggggatcatcaaagcgtcggatgatctaatattttcccaagttccatttttgaaagcttgaagttgtccgcctttgctctccagtagcgttccgacattcagcgtggggaagcaggcttcggccaattcggtggcatcggttgccgtatagctgacagtccccagatcataatagccatttccgccacccgctggaatgatctgctggcttatcggataatacgtagcctctgtagatgtcacacgggcatccatttccgaatagatcgtaatattgtagagcgtgcgtgtattgcgcttgagggtaaatgacgacggcgagccgttgccgagatagagccgtagcgtaaaaagacgaccgtcggtatggctgcaattcagctccatgtatgttgcggcagccggtgcattatcctttgtgcgatctttctcggtagtaatgaacggtacatcgggttggcaattttcgaagatgtaggtttgatcggatgctgttgtgccatttaaggagtaatatgctgtcgtacccgtacatagcgccgcattggtgtattcccctgacgccggagttgcaagagtcgttgtcgaaggaacattgtgcaggcgatacgacagcagcctacaatcggggaaggaacttgcaatagaaaaattgaaggcgacataagcgtatgttcttttcagcggcagatttatatttgttccagcggttgtgcttagttcgcccatgtatgtcataacggcattattataggtgtcgatatcgagctgagcaagtgtcgttgtgtgcaacgtagatacatctgcatttccgagatcttttcctgcatttccgattgccacgatgtgataattcccggcgataatctgcatggtggccacagaaacggatgtgtagtacttatggtatgaaaagaggttgttccagataaaaacattgaggtctttaatggtggtgctttctgctaccgaatcatcgacgcttcccgtagctcttgtagttaaaatcgggtccggagtggtattgaatcggaggtatacactttcttggatttccaaagataaattggtgtcctgctcacaagacgttagaaatgctccaaaagcaattaaaaccgataatttgagatatttcttaatggagatcattacgttttatttttatgagatttaataaaaaacagagtatctcttgtcacgaaatttattcaaccctttttcaactaaatcaagaaagagataccctgttgtggtaaaatggcagttattagtcgtctacataacttttatagacgggtttattaatagatggtttgattattcatggcggtgtttcgattctatttcatcattgtaatatccggcggtaaatagtatttcgtgttggccgactctatgtatctgtcgttatagtggaatttgaaacccggattgtcgccggggcgtatcgagacggagaatttttcgtcgcagcgccagaggtaggtcgagttcctcgctcctttggtgatcgtcggcattgctgtcgatctctgtccgacgggcgggatcttcgacctatcgagtcggtattcctcataatagaacttcaccggctcggaagccttgtaatcggtcgaatactgcgtgcggtaatcgtaggctaccttcggtacgggacgtccgccttccatgacgagatactgaaattctatccgggcgattccctgccgggttatgttcactgtccggggcttgagtctgacttcaagccgcgtgatgcagtcgcgcgagagctggagtgcataagtcgcctcgttggataggagctgcccggtgctgtcataccagccggccggttcgaagttgaacaactcctcgttcaccagtgcgagcgttaccttttcaccttcagtattgtgctctccggctccctcgatggtgaaacaaccctcgacgctgctggtcacgactatgttcttcacgacgtccatgtatgcgcgtgcttttgccgatgtcttgcctgctgtgacctcgaattcgaggatctgctcgccgatctcttcgggtgcatactcgaatgtcgcatccgcatcgacggggtaggcctgcccgttcacggcatagccgttccggaagattttgcctttgccctgactgagggtcggtgttacgacgaatttcccgtctgcgcccggcacaccttgaatgtggagcagcaccggaatccgggcatcggccgcggggtttacgatcttcgcttcgcagacagcttcggccgtgatttctgatggcgctgttaccgtcaccttcaggtcttgctgttcgctgacttcgccatcaggggacttggcctgaaaacttacgagcagatctcccgcttgggccggggtaattacaaggcgtgcatgcttggccgcgagctgcacccattggccggacgtgtccatgtcgcttccgtcgagcatgattgcggcctgcccctggcggataaacgccgagagggagaagttcccgcccacaccttcctgagcaacggtcagcgtgaggcttacggcctgtcccagttcacagaccgttgcgacggtagacagggataattgcggcttcggctcgacgatccggtatttcgacggggagcatccggccgatacgaacagcgccaatgcgtaaaataaggtcgttctcatggtgtcgtcagtttgttacgatgatctcaagagtcttgaattgggtggtatatccgtccgttgccgagaactggagacggtgcatgccccgctcggcggcagtgtagtagagcggctgttcgctattggccggcacggagaacgcttcggccggggtgacggccacggctccgtactggagcgtgccgctgcctgccagttgcgtgtaggttacggggatcgcccctgtccatccggattttgtgaggagcatcgtcagctcgatccgctcggtgacggatgccgtttcggggtattcgacttccagtgcgagtgcgggactcttctgaacgttgaagtttatgaagctgcggccggactgctcgccctctttggttttgacctcgaaggatatgcgcagcggcccggccagcgtcggcgtgagcgtcaggatctccgtagtgttggacatcgacgcccatgtgccgtcggtcgggaggtcgctgccctgcatcgagagctcgcaggccccttcgctgagtacggccgagagctgaaattccccgtcgtacccctgctgcgagaccttgagctggagatacgccggctggttgatgatgtagacgtcctgcaaggccgtcacttcgagcgtcggccgaggctcggtgatccgatattcggattttccgcaaccgaaggctgccatggcccagaggtataggagtgtcgttctgaaaagtttcatagggtagtcgtttgaattatcacagctcttccgtctgcaagtctcggacgggatatgtccggttgtcgggttcgtagaggaaaaaatatattcgttcgaattgtgtgagactgattgcccaaaggtgtgatccgtccgcggcagtggaggatatgtaatgctcgttggcttttagttttcggccacctatcaagctcagacatcgttgtacttcgtccagattttgacgtatcaaatacatttgtcccgcagctggctggtaccatttgcccggattatctttatcgtagttgtaacatttttcggtgaactcgattttccgcataacgtctttggcattgagtaatgcctctgtgttttttcggccgttataatcaaatttggcttctctccagtcctgaatgaccatgagatcaggcacgttcgtgaatttatccccgccccaatctccgataacgggatccggggccatcagaaacctgcattcctccgtgatgattgcgacaccttcagcttgttctttccattcttggtgccatgccgaacttgggtagtagagtgaattgcagtaaatatatacgccgggctcgggattcgtgaggcttccgttaatccccttgacttcgacttcgatgtccacttcggaaacactgatgtcgtcctttactatgcagtggattttgtgtaagccggtttcatggggctggtatgagagcatattatgggagtctgcagggcagtagaaccgatttccggcactgccgtcttcgagtatgaaaaatccgttgccttcagttgacagttgtacgaaaaagtcaccggcataattctctttggttgctgttaaaataaatttgcactgctgttccaaattgattgtcggggtgatacattcgacattcgttatgatttccgcagtattgacactcactgcataaattcttttttcgacctttgtcccgtcggccgagattgcatagataccgaagttgaacggctgtttggccgtcgccccggcttggggcgtaattttcaggtggagcaccttcgaggagaactcctcgttgacgatctcgtagggaatctgctgttcggcttgccattgcagttcatggccgtctactgttgccacggccttacctccgttgcaggaggtgttcaacaggaaatagtctgctgccggattcttttcggtgattgtcagtgttgcctcgattacttcgcctaactcgtattctcggctctggtaatcgagtgccatgctgatcgtagattccgggctgagagtctccggttctgtggagtctttgctgcatgcgatggtaataacaagcagtaaggatagaataattcgtattttcatggcacaatgtatttggtgaaagtgccgccggtgggactcaaacccacaacctcagctcccgatgggaggtgtgctctttcaattgagctacggtggccagaatcatccccgacaatgcggggatgatgaaatagattactttcctacattcacgttctgcgttgaaagtgcttcccaattggctatggcgattgacagcgtcatgtctttaccggtaagtccgtcgaggtttacattgagtttatatgaaccgttgcgaagcatctttccgtcggtggtgcctgttagttcggtttcataggataacggtacttggtcggccgtggtcgagagatttccatcagcatcatagatagcatcgaggactacttttattcgcgatcccgtagcggctgcggccttctcgttgatgtagaaaaggttgttgtacttgtatgcgttcgttttcgacgctccggtcttgtcgcagtaggcgtcctgtgccgaggtgaaggaagaacttacggttgcatatttgctcgccgtctggtcaatcagataagatttctcggctcctttgctcaatgtaattttcttgatctcgatacaaccgttgccatatttgctccggaacgcatccgtcatggtggtctgaatctcgaccttcgccacgacgcgcttcacggtcatggttacggacgttgtccctgctgcgattttggcggttgtagctccggtcattacgaatcctccggagcgcatggcctttgtcgtgacgtttgcgtaggtgccgttgtaggaggcgatgtcgctctccaactcttcgagcagcttggccttggtggtgatgttatccgctatgttacggttaataacgacatagaaatcacacgaggcatcggcgctcacgcccggaagtacgaacttgatcggcgtcgtggtcgagccgttcatttcggcggcggtcagtacgcggcgcaggatttgcgtgcccgaggtgttgtagacgataagtacggcggaggagatcgacttctcccaactttcggtagtgccggagccaaaggcgcgggttccgtcagctacactttcatttttcaggataagttcgatttcgccttcctttccaccgttggtcggtgtaggattaacttcgtctttcgtgcaggctgcaagcagcatcggcattaccgcgattgcggtcagtttcataaaaaattttttcatagaggatgattaaaaaattaagtgagaaaataagttattttcgagcctatgctccgaaatgttcttcttgaatgactgttccttcccagtcggagataatcaccgtcacattggctccgttcaggagaatgcggatgtctatctcgacgtcgtgtcccggattaggggcgatctctatgtagcgttgtatcgtggccacaaagagttcatgcccgtaaatcgaggtgggatcgtcggtgtagatgccgattgagattggcgagtccgaaggaaagtagggcgtgtaaaacgatcccgacatggtgccggccgccgggtcgcgggccagttggggacgatacattctgaagccgccgcagggcttgttgtcaaaactcagagcggcgtagttgttcagcccgaaatagaaatcttcggggttgttgatgttctgcatcccttcgacacggacgttgaccttgtatacggacttgaacaggtcgatgtcgaagcgcagcgagtcgcccttttggatcggcgtctggatgcggttgaagaaaagcgggtcggcacccgtatccgggaaggtgatggcggcatcgccgaggttgtctgccgataccgtggagccatgccctacgttcgcaagcgtcacaatcccatattctccattggaaatgtaggtctgcatggctccggtatcggtcaggaattcgtcccgcgtaagcgtcgtgtcgcggtactgcctgccggtcttcaggtcgaagaagaacaggcgcagggtctgcacctcgtccatggtgtcgtgctccccgtcgttgtagttgtagcgcaggtatacgatggccttgcgcttcacatcgacgtcgatgtcgtcgtggatctcgcagccggggagaaggcttgcgagcaaaagtcctgtgaacagtatttggataggtttcatgctgctatttcttgaatccgattttttgtggttcctgccgaatttgcggtagcttgacggacagtgcccctatggcctcgtaaattgcgtcgatgtccttgccgatgtcttcgctcatgtcgttcatggctttcaggttctcccgaacttcatgttcgataagctgaagacggctgcgcatttccgcaagctcggccgaatgctgcgatgcctgcgtgagatagttgcgcatggcgacgaatgcccgcatgatggcgatattgacttgtatcgcagacccgctgcgcaacacactcgataacatggcaacgcccatttcggtaaaagcgaacggcatataccgaatgccgcccttgtttgaggtcacaatttgtgacctcaaactgtctttcaaagagttatactcttcgttcgaaatctcgaacataaaatcttccggaaaccgctcgatatttcggcggacagcctgttttaaaactttcgtctctacctgatagagtgcagccaggtcgaagtcgagcatcacctgctgtccacggatctcgtagatcttattttgtatggtttgtagttccatcttaccaggatgcttttacgttattctgtttgtataaaatttggatctctggatcgaggttaccgcggaacttcagcaccggatctgcctgaatcgccttgaggtaatactccagtccttcgcgcggccggttcatgcgcgagagtgctattgcagataggtaatcggttcttgggttcttctcggccggcggcagctgctccagaatctcgaaagccgcctcgtcgtaactcagcgagagcagcacgatcgcaaggttctggcacttgtagtcgttcagggtgcgcagcgccccgacataatcccggtcgcggagctgctgtacgccgcgcatgtaggtcgtatcgagtacggtcagcacgacggtatccttgaccatatcgacgcggcggaggttatagcggaagtctacggcccgcaactggggatagaggatctccttcatgaaggcgtagtccttgggaaactgctggcggatttgcggctccgttacgtcgaggttactgctttgatcgatcatggccatgatttgttcccagttaggcatatcgctgttgtgacggatcaggcgcttgagcagcgtccagtcctcaccgatcgagcgggtgcgaatgagcgtatcgacttcccggccgaacttgcgcaccaggcgctccttgattgcccgggcacgctcgccggcaatacggttgttggtcgccatcgagccgtcgggagaggatgaagcggtaatggtgatagaatcgacgaaaaactcgtattggttgataagcgtgtccatcaggcgctcgattttggcaagctgcacatggttctggcccatcgtgtcgattacattggcacggccgaccgggaaggtgatgtagttgcggtcgcgtacctcgacgtacttgtcgatgatcttgagcatgtaccgcggctcgttgtcaaggagcgacaacatggatgtcacggtgtaggtaagcgtgtcgctgttcgagaggtcgtagcggctgcggtcgatggcgtcgacgcggccgcggaaaaagaggtgcaggcgcttggtatccttcgtcggccggtaggtctgggtgtagtaataccgaatctcccctttgcggatcagcacggagtcgagccgcggatcggataaataggggaacgagatcgtttgtttgtaggtggactccagtttgtcggcccggcgcttctggccgccggcgatgtagcggttgtaggcttcgtagtacttcgcggccaggccggtggtggacgtaagctccgtcgagtcgccgagcatgcggttcaggtacttgttcatctgccagtactggcgcttctggatgtcggaaaaaagctcaccccggatagagagcggttgcagcgcctcttccatcccattgttctctatgatcggggtgagcgacaacccccacgtgctgctctggagagcagcgggtatgcctacgatgaagtcaatcgcaatctcgccgttgcgttcggctacggttttcgacttggcaacgatgtagaccgtctgaatgttctcgcctttgatggtgacttctcccgtggagtcgcgttcgacctcggccagataggcgctgtcacggccgccgttcatcgagatttttcgcatttgcgtgacagcccgttcgacgtcttctacttcgggtgtctccacggggccattgctgggcagatggatgtcggccgtcggggtgctgcgctgcaaggagtgcgtcatggcgcaagagagcatcaggacagtcagagctatggaaacgagtgttttatatgggttcatttcttagttgatttgatgtccgataatccttcggcgatatattcgtttgcctttgccagatgcgagttctcccgcggacattgaagttcctgcttctccggtgccgtggcatgccactcctcatagcagtcgggacaatacatgagattgacggctcctacgtagaacccgtttgaactgattttccggccacagcggtcgcaggtcttggcacgtggccataccttgatttcgtcggcagacaatggcagtactttgtatcctttggaattttcaaaagttgttgtcatgggatctgtgaattagaacaagtaggaaaatgacaggttgcatttgatcgggacgagcaggaaccggcggtgacgataggtatactcgtcgtcgaactccccgatgtgcttcggccgcagcttctcggtgtagggggtatagacgataccggccccgatctcgacgatgaagttccagcgggtactcaggagtttcgagtaaccccaagagcatccgatgccgtaggcattgcctttgaaggtgcgtttgtcgtaacctatggtgtagttggcataaaacagcgagggggagacgaactgtccgatgtatcgctcgacgaaccagtgccgccatcccggttgcaggacgacatggctccactgggtgtctccgaacttgaacggattggccgagaccggaatgttgatcgtattgtgcaagttcacgttcagatcgacggctgcgtttatattcccggcagcccatccgacgatattggtcgagacggacgagaactgggcctgcgcaaccgctgaaataagaattgcggcaatagataagaagatatgtttcatttgcaaacgttattaaaatgctaatttgttaaattgggaccggatcttttgatatacttcttcccttcaccaatcaacattttctgccatcggaggtataaatagcaatacgggagcggattttgctcaatgccgttcttggaaactccgtagtgcaggtgtggccctgtgctgcgccctgtgctgccgacacgtccgattgcctggccgatatgaacactgtcacgttccgcaacgtcgatcgaactcaaatggccgtaaagggtcatgaagccgtaatcatggcgcagtcggatgaactttccgatcgttgcagtccggccgaccttcgccaccattcctcccgctgtcgcataaacccattcgcccgggttgccaggcagatctatgcctgcgtggtgtttgtattcattcaggagcggatggagacgggttccgtaagcggagctgatccggaggtgtcgaaaatcttcggcccgaagtggcgagatgcagggtacatggtcaattatcggattcggccgcttgagcagcagaatcgtttgttcgacttggcggtagttttctgccatattcaataatcgctcgataccggtttgcggtgcgaaactgcaaaccgtcgcggcgcataatataagaaatgtcatgctctcgtaattttactgccgtagtaggtattacatgtgtttttagcagggatgccgttctttcgcaacggatgatacctgtattggatggaaccgtcgaaggggtcgataaaacagccgcagatcacgccgatacgtttgtgccagtcgtaatcaatttctacaagtgccccatctgcaaattctcggtcttcgaggtgttcttcgtccaatgcagcgattgccagatcgagcgtctgacgacgctctttatattctttattcgtcataatttatatccttcgttttcggccaaacattttaatccgtcgtaaacagcttcccagacatacgatttatgatgtttgaataggtgctgtttgataatggagtccatttctgcggtgaactcaatagtggatcttcgaacagtcgttctgatctttttacgccccttttttacaccgcgacgtctggagccttgtcccatgtcggtaatcaggttatcaagttcactggtcataactatttctttttgagtcggagcatcacttctttataaaacgcagccatatcgagagccgcattgctgcgtttatcaaattcataaacgcttttatgtgccagttcggccctccggaaactttcacaatagcgaatccggcaatcaaatacaggcagaccgctatcgttcaaatgcgaaataagattttgggatgcgattctacctgcgctaaaaagcgttggaagtattcccaaaaccgtaacttttggattgtattcccgttgaatggttgttattgcagcaatcacggagtcgaggccttgcgatgcgaattcgccggttgtaaccggaatgattacgtaatctgcagctacgacagcattgacaactgtttgacctaaactgggtgggcaatcaataatcgcgtagtcataaatttccgtataatcccgactatgcaatatatctgtgaggatgtacaatgaattgttttccccttcgatcaaagaattaatcttagaggatctagcattggatggaataatatgcagattctttctgacaatagacggggtaactttatcgcgcatggcaaaaatcccgaaaaaattgtcttgtttgggtacatcagtttggtagaagtgagtaaggtttgcctgtgggtctgcatcaataagtagtacgcgctttttttcaaccgtggctatatattctgccaagttgatcgttgacgtggttttgccaaccccgcctttcagattgagaattgttataactttcattgtgctaaagtattgaagggtttgagaaatcgaattcagcttgtatctcagcaggtttgagtagttcgccaagcactatattttgcatagcctgtcgataataggctgcatgattcgttatttcgccttcattatcggcgatatatgcaagtaattcgttatgttttctatacacatagcggctattctgcggggtgatcttttctaaaattgagttcatggagcgagctgttatccccaaatgtgagcctgtgtccttaatccggctcactcggttcttataatcccgtcgctcctgatcactcaactgcccattatggatgatgaaataaattatatcaggaatcttcgaacgctggggaaaccgctcgtaaaatgtgaaccagtaattggttttgtgcattaaggcatcggcgctgcttttcagtatccgtttccgaaaatcgtgatacgaattgtattttgttggatctacatttaaaatagatctcagttccaaatagggaacagtccattggcctttatccgcccaacgacagatattgaaatataacttggcagtatagattgaactggctttctcaacggtctctttcaagatttgggagaaaccgttttgaggattaatgattgtatgtacaatctgttcgtgaaaaaagaaatgtgcattctgacgacgtttattttttcgttcaatcgcaacatgacacaatcctccagttgcagacagttccgcatttgtcaaagccgatctttgcggaaaagtcacactgatacggctcatgtcgaggagagctctttcgagttcgttataatgttcgggcctaacgccaaagtctcgtaatggtaatacaatctctaccatgtgtgattttttatcccaatagacattttttgcctggagggaaatcttgccatcaggggtatcgaaatttgtccgaataatcggttgtagcgatattgcaatacgaaatagagcgaggaactgcgtgtaagagtacgcagatctcatatcaataaacagattgggatgcttgaccttcgtatatgacgatatatcaatagctgtttccgaaacgttatttcccggaatcgtgtagacgtagccacccctatctcgtatttttacctgattcgccatctgtaaaatttggggagacaggggcaactgcctccccgaagtttctctactttacttcgaaaaatagattattaaaagaaccatatatgcgctttctacgcatatttgaatatcattttggaatccaattccccatgatgtcttgtttgaatttcgattcatgccttttccaactccatttctcggctcgtgtgtgatcataagccttaatccattctgttgttggatatttcgttataattctattttttatttctccgctttgaacttgtcttatcgaacagttgtgccatttaattatccggcagtttggacaatcatagactatctttttccttgcctctgcattatcggaacatgcaggacaaagcatcttaaacagtacagtgtatgtccgcaggcgtagatattcacgtttttcttgttcgtctacgattgcccagtattcggcccactctttttttgtcaatggtcggttgctccccatcttgagttttgatatatagtaattgaactgatgattgacaaagagcctgattgatctctaccctactcagatagtatctcgcgccattttttctcagactaatcaaattagcttcgagaagttttcggattttggattctccaaattccaactcagctttctttcgggatagagtatcggattttggccgcaactctttcagaaccgttgaagaaccgactgcaatagcctcttcaagtagttgctttattgttttgaggtccgggatcatcatttatccgtgttataataaacagtttcggtttcctgtgtttgtgtgtcttaaatcgtaaatgagaatatcttgcgctccttcgcaaccgtttaatcgcggcacgagcattatctgctgtattatcttccaatttcagcgaccaagcatcattgatctccatttctgtcagtacagcctgccagttggacggcgcggattctggtcgcttttttaagatcctccccatttttggttaattcctattttttcagtaacttaccccgatttattggggtatgaacgtatggtacgttcgtaccacgatgcaaatatctaactattttacgacacatgcaagaaaaagaggaaaatattacgaaaattatttatcggctgcaagagtatgttaagtataaaggcattacacttaaccagattgctgttgttattggagtaagcaatagctattttagcaaaatggccagtagtggaggctctttaggtgaagatatcatccgtaagatattactattttacgacgatctgaattctgattggcttatcatcgggcgtggcaaaatgataaaagatagagcaatttctcaaaatgaggctcccgattttgtgaatgctaaacttgttcaggcacttgctgatgcaaataaagcattatctgcggcaaatgaaaccatacttcagcaacaggaaataattgcaaatcacacaaatacaacaacttacacccccccccatgcagggtcggaggcaaaacttccactaaacccagttgataaaaaataacacgctttaaggggtctataaaaagaaataagataaatcgcgcattttaagcccgaattttttatctcaggccgaatatgaccccacattcgttttcttggagaaaatcgaaatttgggaacttaaaatcgcaaatagcgcctattgcgctactttgtataacctcgcatcagaattgaaatcagttaaataaattccgaatgttgcccaaataagatttcgtacaaggttgcaaattgctgaatatgaattgaaataggatagataataccttagtcttctaagctgtcggtcgtgggttcgaatcccgccgggatcactcgacgccgggccgcaaatgcggcccggcattttttcatccgtatcgaaaacgccataaaacagccttccgcgcgcatttttccgcaatttattttgccgggcggaatattttgcctacatttgcaggcttaaaagcccaaagtgggtgagcgttttttattaattacaacaaaattttatagcaaaatggctgttaaaattcgtctggcacgtcatggtaagaagggttacgccttctatcacatcgttgccgcagatagcagggcgccacgtgatggtagatttatcgagaagctgggtacctacaaccccaacacgaatcctgctacgatcgacctggacttcgagaaagcactgggctggttgcagaaaggcgcacaacctacggatacctgtcgggcaattctctcgtacaagggcgtattatacaagaagcacctgctgggcggtatcgccaagggcgcattctcggagaccgaagccgaagctcgtttcaacaaatggatgaccgagaaggccggtaagatcgaggctaagggcaacaagctcgaagcggatgccaagtcggccgaaaaggcccgtctggccgccgaagccaaagtcaaggaggagcgcgcaaaggccatcgccgagaagaaggccgcagccgaagctgccgccaaggaggccgagcaggccgctgccgcagagggcgcagaagcacccgctgaaggcgaagccgaagctcccgccgcagaataagcgcagaacgcttctttccggaatcccggtaaatttcccaacgcgggagatttaccggtttttttcattacttttgtaaactctttccggccgggcggcacgccccgcagcgccacgccacgcatggaaagtccccctgccgcaccgccggacgagcgagaatcgcacgctccacgcgatgcggaggataaaacaccgtaaaccgaaccgacatgagcgtttccatacccgcaggcagaatcaacaagcttttcggcaccgacggcggagtgatgctgtcgctttacgccgatttccccgcggatttcgacaccgacatcccgctgctggtcaccatcgacgccctcgaagtgccgctctggtgcgaacgtttcgaacgccgcggagcctcaggcgccgtcgccgcattcgccgacttcgacaccgaacgccgggcgcaggagctgctcggcctcgaattccgcatccggttcgacgaggaggatgacgacgaattctacatggaggacctgatcggattcgccgttacgggcttcgagatacggcacggcggcacggaaaacggcggaaacggcggaaatgacgatggcaacaacgcaaacaacgacacctgcaacgacgacggcagcagaggcggcagcaacgataatgccaacgccaacagcgccggcagcgccgccggcgacagcatgccccctgccggacaattcgcaggcagggtcgcggactattatgacagcgaagccaacccgctcttcgagctggaaatcggcggccgccgggtgctggtccccgccgccgaggagttcatcgcccatatcgacttcgaggggcgcacgatgaagatgatcctgcccgaagggctgatcgacctataagattttcaagacaatatggcacacgtagtaatcggattatcgggcggcgtggattcgtccgtcgcggcgtatctcctcaaacggcaggggcacgacgtcacggggcttttcatgatcaactggcacgacaccacgggcacgctcgaaggcgactgcccgtggcacgacgaccgggttttcgccgagctggtcgccaaacggctcgacattccgctgcgcatcgtggacctctcggccgactaccgtacgcgcgtggtcgattacatgttcgccgagtacgaaaagggccgcacgcccaaccccgacgtgctgtgcaaccgcgaaatcaagttcgacgtctttctgcgcgaagccctcaagctgggcgcggacttcgtcgccacgggccactactgccgcaaggccgaagagttccttcccgacggacggacggtcttcaagctgctcgccggcgccgaccccaacaaggaccagagctattttctctgccagctttcgcaggaacagctgcgctacgccctgttcccgatcggcgatctgctgaaacccgaagtgcggcgcatcgccgctgagcagggactcgccaccgccaagcgcaaagattcgcagggcatctgcttcgtgggcaaggtggacctgcccgctttcctccagcagaaactggcttcgaaaaagggcaacgtccacgagatcctcccctcgtggccgaaatacgaccgggctttggccgcagccccggccaaagccgaaaacgccgctggccccggtacgtcagacgcccggacgaacagcacgctttcgaccgaaaaccgggctatacctgctgaagcggatgccgaagtcgcccgaaccgacggcgaaccctcgaccgaacgccttaccgccctcgccgccccgtggcgctacaccgtacgcgacggcaagaagatcggcgagcacaacggcgcgcatttctacaccatcggccagcgcaaggggctgggcatcggcggccgccgggagtcgctcttcatccttgcgaccgacaccgcgcagaacgtcatctacgtgggcgagggcgacgcccatcccggtttgtggcgcccggcgctgcacatcgctcccggcgaaatccactgggtcaatcccgcacgcgccctctcgcccggacagagcgcccgcttcagcgtccgcatccgctaccgccagccgcttcaggacgcaacgctcttcatgcgcgacgagggcgcctacatcctcttcgaccaaccccagcggggcatcacgcccggacagttcgccgcatggtacgacggcgacgaactggtcggttcgggcgtaatctccgaatgaccgcgttcccgcagccgccaaacgccgctgcttgccgcacaccggaaaaacaccggaaaaacatcgggataattccgactccaatcaaacgttcagcctatgaatatcgaagatttcaggacctactgcctttcgttcaagggggcctatgaaaagatgccgttcgagaaagcggcttccgcatacgaccggaacctgctcgtcttctgcgtcgcggagaaatggttttgcttcgtaaacgtcgagacattcgatttctgcaatatcaaatgcgctcccgaccggatcgtggatttgcaggagcgttacgaaggagtgacgccggcataccatatgaataaaaaacactggataagcgtacatttcgacaaagacgtacccgacagaacgatcgaagacctcgtgaagcaatcgtacgatcttgtcgcggcttccctgccgaaaaaggaaagagcggctttgcagaccccgtaatcggcatcggggaacggcatcagggagatatacggcgacggaggaaaaaaactccgtcttttttatgccccggcgagagccggaaggtcacttagacatagataagtattgcttaggtataagcggtcattcacaatggcacgttttttagttttacatccgaaaaacgtacattgtgaaaacagcgatcgacctatacgtaatcgacgccattcgacgcgaacgaagggctcagaaagtatctcaggccatgttgtcctttgggatcggcgtttcgcgcggttttgtcggtcaggtcgaaagtccgaagtataacacaaaatacaacataatccacatcaacgagatcgccaaatttctgggttgttcgccgcgcaagtttctgcccgaagaaccgatctgaccttcggcccatgttcccgcaccgcacggcatcagccaccaagcaccgtccccggaccggaccgaaataccgatccgggaaacgtccgctcctgccgttccgcacgcttcttctcgcagcgctcctcctctccggcatccgctgcgccctcgcccagccccgcatcggcatcgcctactgcgacctcgaccacctctacgacaccataccggcgctcttttacgacgacagcgactacacgcccggcgggcgtctcgcgtgggacacggaacgctaccgccgcaagatagcccgcgcggccgccgtcatcgactcgatgcgcatgccgctcgtcgcgctgtggagcgtcgaaaacgaagcggtcgtgcgcgacatcgcggcggcctgccggggcgactacagctacctgcactgcacgcttaactcgctcgacggcatggatttcgcactgctctactacggcgacctcttcgatccccactacgaggagccgggacgccgctatctctacatcgaaggcaccctgcgcttccccgccccgcgcacccgccgcacaaccggccgcccggtccgcccgtcgcgcaccgacaccgtgggactggtgttgtgcagcgacacgcgcatggccgaatgggtcgtccgcgacctgcgcgaagaacgccccggcgtgaagctgatcgttctggggcgcaccgcctcgctcgacgcggcggcatacggactgcgcgacgccctcgaacgtccggcccggctgggccggggcaacgtccgccgccgcggaggctggctcatgcgcgaccgcattctggccgacaccgcgctgatatgttcgggcggcgacgttttcgcccgccgctatctgcttgatcccaagacgggtaacccgctgccgacctacgagagacggcgttaccggggcggcttcggctacgccctgccggtattcgtttacttggagtagaattttttggaatttcagaaaagttttcctatattcgcattcccaacggcaaataggattcttcgacgaggcggtaacagcgatgtcaccgcaattttcgtctgtaggggaagagattagctaaaaatttttataaatttacatatcattaaattaaccaagaaaaaaaattatggcagacgtaaaacgagtctataccttcggcaacaaggaagccgaaggcaacggcaaaatgcgtgaactgctcggcggcaaaggtgccaaccttgcggagatgaacctcatcggcattcccgttcctccgggattcaccatcaccaccgaagtatgtgcggaatattatgcccacggcaaggaggcggtcatcaagatgctccgtcccgaagtcgagcgggcgatgcagaatatcgagaaactgaccggcatgaagttcggcgacaaggagatgccgctgctggtttcggtccgttcgggcgcacgcgcctcgatgcccggcatgatggacacgatcctcaatctgggtatgaacgatcaggccgtggaggctgtcgccaagcgcacgggcaacccccgcttcgcatgggactcgtaccgccgtttcgtacagatgtacggcgacgtggtgctgggcatgaagcccgaatcgaaagaggaccacgacccgttcgaggtcatcatcgaggagcagaaggagaagcgcggcgtcaagaacgacaccgacctgacgaccgacgacctgaaggagctggtgcagaacttcaaggccgccgtcaagaagcagaccggcgaggatttcccggcatgcccttgggatcagctctggggagccgtatgcgccgtgttcggctcgtggatgaacgagcgcgccatcctctaccgcaagctcaacaacatccccgcagagtggggaacggccgttaccgtgcaggccatggtattcggcaacatgggcgccaactcggcgacgggcgtagccttctcgcgcgacgccgcgacgggtgaaaacctcttcaacggcgagtacctgatcaacgcgcagggcgaggacgtcgtggccggcatccgcaccccgcagcagatcaccatcgaaggctcgaagcgctgggccgtggcccagaatgtctccgaggaggagcgccgcacgaaatacccttcgctcgaagaggtcatgccgacggtttacaaggagctggacgagattcagcgccacttggagcagtacttcaaggacatgcaggacatcgagttcacgattcaggacggcaagttgtggatgctccagtgccgcaacggcaagcgcaccggcgccgccatggtcaagatcgcgatggacatgctccgcgaaggtctgatcgacgagcgcaccgccgtgctgcgctgcgagccggccaaactcgacgagctgctgcaccccgtattcgacaagaaggccatcgccaatgcgcaggtcatcaccaagggtctgcccgcatcgccgggagccgctacgggtccggtggtgttcttcgccgaggacgccgagaagatcctcgcagagtcgggccagaaagcgatcctcgtccgcatcgagacttcgcctgaggacctcaagggcatgcttgacgcggcaggtatcctgaccgcacgcggcggcatgacgtcgcacgcggccgtcgtcgcacgcggcatgggcaaatgctgcgtatcgggcgccggcgagctggagatcgactataaaacccgcacgatccgcgtgaacggcttcaccgtgaaggagggcgactggatttcgctcaacggctcgacgggagaggtttatctgggtcaggtagccacgatggccgccgacctgagcggcgatttcggccagctgatggagcttgcgggcaaatacgccgtgctgaaggttcgcgccaacgccgacacccccaaggacgccctgcaggcattcgcattcggcgccgagggtatcggcctctgccgcacggagcacatgttcttcgaaggcgaccgcatcaaggccatccgcgagatgattctggccgacgacgaagccggacgccgcgtggcgctggccaagctgctgccgatccagcgcggcgacttcgagggtctgttcaaggccatgaacggcttccccgtgaccgtacgtcttctcgacccgcccctgcacgagttcgtgccgcacgacgagaagggacagcaggagatggccaaggagatgaacgtacccctccagaagatcgtcgccaaagtcgagtcgctggccgagttcaacccgatgctgggacaccgcggctgtcgtctgggcaacacctaccccgaaatcaccgagatgcaggcgcgcgccatcatcgaggccgccatgaacgtcaaggcgcagggcattccggtacacgtcgagatcatggttccgctcgtaggcaaccacaaggagctgcgctaccagaaaggcatcatcgacgcgacggccgagcaggtgttctccgagcgtaacgacaagatcgactacatggtcggcacgatgatcgaggttccgcgcgccgccgtgacggccaaccagatcgccgaggtcgccgagttcttctcgttcggcaccaacgacctgacgcagatgacgctgggcttctcgcgcgacgacatcggcaagttcctgcccgtttacctcgaaaagggcatcctcaagaacgacccgttccagatcctcgaccgcaacggcgtgggccagctgatccgcgaagccgttttcaagggccgttcgacccgcgaaaaactcaaatgcggcatctgcggcgaacacggcggcgaaccttcgtcggtcgagttctgccactacgcagggctgaactacgtgagctgctcgccgttccgcgtgcccatcgcacgtctggcggccgcacacgccgcgctcaacgagaagtagcgttcctccggttacggccgaaatatccgaaaacgaaagcctgcggcacgaaagccgcaggctttcgttttcagcgaaaaaaaagtccggttcgttgaatatgtttggcgaaagcggataagttttgtatatttgctatcggcaaacagtataacacgcaacttttttgttgaattaaaataacagaacatgaagaagatgttttttgcggcaatcgtcgcattattcgcagtgacaaccgtatcagcacaaactccgggcaattgggccgtaggacccaaaatcggcatatatacgaacgcaggcgccgagggtgctatttttggtatcggcgcaaccggattttacagttttacggataattggcgagtagctccaagcattgtcgccctatgcaaaacaggctgttcggtagacatcagcgccgacgtgcagtatctcttcaatatcgccccggactggcatatctatccacaggcgggtctgagcgccaacgatctcttcggctggtcgtgcggcatcaatctgggcggcggcgccgacttctcggtagcccgcaactgggacctttcggcaggcttcaaatggatgattcagactgctaaagattatattcccggatacgttaaacgcagaaatccaatcgttatcaatatcggcgcaacctacaagttctaatccggcgcaacccggaaaacgatatcccggagacctcgacgaggtctccgggatttttcatgtccggccgcgaacgccccgcaccccactgccgcccgccacgaaagccaacgcgcaacgaagtgcggcgagcaacaacgagcgacggtgactgctgcgacggcagtaaagacagcaacggagacagcgaagacagcaacggagacagcagcggaaacgacgagctacagcggcggagagccgtacatttttcaacacccggccaaaagcccccgcaagcaaaacagaacgcacggcccgtccgccgtaaaatacagcaaatcggccggattccgcgacctgaaaacccttccggagagcttcgcagccctccggtgcgggacggtttttcacctccggtcgcgcacaaattccggcggcaaccgatcgcggcacgagtgttgcacgccgttaaggcaatggaacaaaggcggttcgggaagctttccgaatccggagatatgaattaaatgactgacaaccacttattaatacataaaatttaactgaaaattatgaaaaaaattcttctcatctcggttgcggcattgtttgcttgggcagcgtccgctcaggacaacacctaccgcaacactcagaccaacaactaccgcaatgcggctcagacaaacaactaccgcaacgcggctcagacctacaacaacaatgcggctcaggccggcaattaccgcggcacgccctccgattaccgcagtgcggtgggtccgcgtgtcaatttctacaccaacacggacgacgcctcggtcggtatcggcgcctactaccgctacagcttcaattcgcactggcgcatcgagccgtcgatctatgtactgacggaaaaagacagctccgtagacatcaacttcgacgcacactacgtattccagatcgccgactggtggggcgtattcccgcaggtaggtatcgtggccaatgacatcaaggactgggcggtcggcatgagtgtcggcgcaggtttcgacttcaacgtcgcccaccgctggaacatctccgcaggtctcaagtacgagcctatgtttgacagcgaccgttcgaacccgttggtggtatacgtcggcgccgcgtacagattctgacaaacgcacctgcataacacatgcaaaaagcggatcccgatgtgaagtgcaccccaaatattggacggattagtatttgtttagatggcatgagttcggtattgtaccgggctcatgttgtttaagtatttctttatccgcttgttattgtagtagtcgatatattcttccaattcttttcggaaatggtctatggatgagaatttttgcaaatataataattcggacttcaataatccaaagaaactttccatagcagcgttatccagacagttacccttgcgcgacatgctctgtgtaatacctttctgtcttaaacggagctgatactgcttcatctgatactgccagccctggtcggaatgcaagacaatacccggagaatccggtattctggcaaacgcatcgtccagcatcttcatgatctgcataaagttagggcgttcagctattttatagctaataatctcccggttatataagtccataatcggcgatagatataactttacgccgcaaaccgaaaattccgtaaggtcagtaacccacttctgattcggtttttcggctgcaaagtcgcgttgcagaagattgggcgctatccgtccgatctgtcctttgtatgaacagtatttacggagcctgacctgactttttatcccgcaaatattcatcagcttaagtacggttttgtgatttatcgcatatccgatcttattcatttcaacggtaatgcgccgataaccataacgccccttatgttcgtgatataaccttataatactctctttttcgcgagcatatttatcgggttgttttgattttctgaagtgataataaaatgtgcttcgcgccatccctgcggctttgagcaatactgaaagccggcactgcggccttagtccttcgatggcttgggctctttcccgctctcgcggacaatgcgctcctcgactaaggcctgcaattttttaagtaagcattctcggcacgaagatactccagttccttaagcaactcttcgtgcggagtcgttttgagtttgacttttttagtcttcgatttactcatggccggcctccttctttgcggtttacgccgcaggccttcagcaccttggttttgatagagccgctcccattgacgaataacaaaagggcccggaatgccgaaatgcactgctgtctccagcaaagatagatgattttggtgcatatgcttcaaaactgacaacttaaattctgcactgtagctaccgtggcgcagcttaaggccggcaaggccatggcgctcgaataatgttacccacaagtgaacttgcgagcggccacagcccaagtgacatccggcttccctaaccgaaagtccgccttcgagtaccagttttacggcctttaaacgaatctcataattatatttcataaaaaacaccccaaaagtgtccaacttttggggtgcagtacaatgtcgggatccgctttttcatgcggtacggcacaatgccggaatcatctggtcttataggccgcacggtactttcccttggcaaggttcagcaacttgcctttcagcagattgcgacgcagcggcgagatgcggtccgtgaagaccacgccttcgatatggtcgtattcgtgctgaatgacccacgccttcagtccgtggaactcctcgtcgtgctcgacgaagttttcgtcgagataacgcatcctgatggccagcgaacgaggcacatcggcatggatgcccggaaaggaaagacacccttcgttataggtcttcttctcctccgaaaaagcgtagatttcgggattgataaaggcacgcttgtagtcggcgcattcgggatcgtcctcgccccacggcgtgcaatcgacgatgaacagacgaatggccttgccgatctgcggcgcggccagtccgacgccttcggcttcgccgagcgtctggaacatgtcctcgacaagttttttcacttcgggatagtcgggcgcaatctcctcgcactgtttgcgaagcacctcgttcccgtatatgacaatcggataaatcatttgttaaactccatataactttgtaaaataatcgtggcggaaatcttgtccaccaacgccttgttgcgccgggccatcctgccgataccgctttcgagcatcgtgcggtgcgccagcaccgaggtaaaacgctcgtcgtaaaagaccacctccttatcgggataggccctgcgcagccgggctgccagcggctcgacgaaacgccacgtttcggaaggcgtgccgtccatctgcgtcggcttgcccactactatcgtagtaacgtcttccgcggcgaaatattttgccagccacgcttcgagtcccttcgtttcgacggtttctagccccccggcgatcagccgcaggggatcgctcacggcgattcccgtacgcttcgtcccgtaatctatggcgaggatgcggcccacggatcagcgattacagattcagcttccggaaaagcttgcggtaggagcactcctcctcgaccagcgcgggcagcttgtcgatcgcaacacgctcctgctgcatggtgtcgcggtgacgcaccgtcacggtgttgtcttcgagcgtctgaccgtccacggtcacgcagaacggcgtgccgacggcgtcctgacggcggtaacgcttgccgacggaatccttctcgtcgtaaacgacgttgtaatcgtatttcaagaggtccacgatcttctgcgccacttcgggcatgccgtccttcttcaccagcggcagaacggcgaccttcacgggggccagcgccgcaggcagacgcagcacgacgcgcgagtcgccgccttcgagctgctcctcggtataggctgcagacattacctgcaggaacatgcggtccacgccgatcgacgtctcgaccacgtagggtacatagctctcgcccgtttcgggatcgaagtactggatcttgcggcctgagaacttctggtggttgcccaagtcgaagtccgtgcgggagtgaatgccttcgacctccttgaagccgaacgggaagttgtactcgatatcggtcgcggcattggcatagtgcgccagcttctcatggtcgtggaaacggtagcggtcgtcgccgaagcccagcgcgcggtgccatgccatacgggtctccttccatgcctgccaccacttcatctcctcgccggggcgcacgaagaactgcatctccatctgctcgaactcgcgcatgcggaagatgaactgacgggcgacgatctcgttgcggaacgccttgccgatctgcgcgataccgaacggcagtttcatgcgtccggttttctgcacgttcaggaaattcacgaagatgccctgcgccgtttcgggacggaggtagatcgtattggcgccctcggccgtggagcccatctgggtcgagaacatcaggttgaactgacgcacctcggtccagttgcgcgtacctgaaatcgggcagacgatttcacagtccacgatgatctggcgcagctcgcccagatcgccgctgttctgcgcctcgacgaaacgcttatgcatctcgtcgcgccgggcggccgtctcggcaacacggggcgaagtttcgcggtacttggcttcgtcgaaagtctctccgaaacgcttgcgggctttctccacctccttctcgatcttctcgtcctgcttggcgagccagtcttcgatcagcacgtcggcacggtaacgcttcttcgagtccttgttgtcgatcagcgggtcgttgaacgcgccgacatgtcccgaagcctcccacgtacgggggtgcatgaagatcgcggcgtcgatgcccacgatattctcatgcagcttgaccatcgaatcccaccagtagcgcttgatgttgtttttcaactccacgccgttctgtccgtagtcgtacaccgcagccagaccgtcgtagatttcgctcgacgggaatacgaatccgtattccttgcagtgggcgatcagctttttgaagagttcttcctgtgtcatcgtatttggtttttaaattattttccgaattacaaaagtacaaaataaatggaaattaagccgttctgttgcgattttatttctatatttgtcacggcggcctgcgagggcggccgacatacgagacataaaaagcgcatcggcttttttcttgcaggtgaaaattggacactttcgcgtaaggtaaggaacaaaggttgatgctctcgctgtttttcagcgcgggcatattccatcattctaccttacgggtcgtccaataccccacttgcggatgtggaaacaggtccgcgcttttgtgtccggcaacaggtgaaaagacccaaatcaaccaatgacgggaatcgtaaaacttctgattgcgctcattgccgtcgccataatagcgttgtgcggcagtatcggaagagacaaataatgcgtcacgaaatcagtccctcgcgcaggaacgagaaatctccttcacgggcgatgatgatatgatccagcagccggatgtcgaacagcgcggccgcctgcgcgatcctttcggtcagcaccttgtcctgcggactggcttcggcggcgccggaggggtggttgtgaatcaggataagctgtgtggcaagcagttccaaagcccgtttgataatcagccggtgatcgacgaccgtgccctgcacgccgccctgacttacccgctggcgttcgatgatccggttcgaagaggtgaggtaaacggcccagcactcttcatgcgagagcgtttcgagctgcgggcggaagagccgcaccacgtcgtcgctcgacgagacgacgtcggtttcggcggcgcgcgcagcggtgatgcgacggccgagttcggccgcggcgagcagcatgcgggcgcgccggagtcccagaccgccgatcatcctcagacgggcggcctcctccgagccgacacgcgcaagcgatccgccgtaagcggcaagcagcgcttcggcgctctgttcatcctcggtaagcagggagagcaattcccggtcggtcagcgcatcgacgccacgcgccgccatcttatcggctatcgtcttcattcggaaatgttatagggaagctatcccgccatgcgtccggcggcctccggcagagaccgcacgcaatacaggcgcacgggaaataaccaaaagttattgcgtcagcctgtccacccggtccagcagcgtggcgcactgctcgtcgctcatgtactgcgccaccgagaaagccgcatgctgctcggcctccttcttcgaatcgccggacccgtggccgacctccatgccgtcgaccagcaccgtggagtagaaaaccggatggttcgccgaatactccttgtcgtaaccggtgcggaaagcgatcttgtgacggtttttctggcaccactcgatcagccggctcttgaagtcggtctccgattcggtcagctcgtcgagactcaggtgtctgaaataaatccggttgatgagcagccggttcacgaattcatagccctgatcgaggtagaccgcgccgatcatggcctcgaaagcgtcgccgtagatatgtttctgcgtgacgctggtgctgccgttcgaaatgacgtgacggtccagcccgatattcacggccagcacgttgagcgactggcgggagacgattttcgaccgcagctgcgtaaggaaaccctcgtcccggtcgggatactcgataaaaaggtagtcggaggtgaccgcctcgatgacggcgtcgcccagaaattcgagccgctcgttgttgatagcgcggccgtcctccaaaaccaaagaagctgacttgtgaatcaaagccagcttgtaaagctcgatgttgttcgggatgaacccgaacatgtcatcgataattctgtaatacgccttatcccgcccgaagttccttctaagggggcgcagtatgaaatcaaacacggcccggacggtttaaaacgttagagtttacggaaaatgatcgaggagttgtgaccgccgaaaccgaacgtattgctcagcgcgcatttcacgtcgcgcttctgcgccttgttcagcgtcaggttcaggttcgggtcgatctccggatcgagattctcgcagttgatggtcgggggaaccacgccgtgcgtaatggcgaagatgcaggccagcgcctcggcggctccggcggcacccagcaggtgtcccgtcatcgacttggtggaagagatattgatgttgtagacgtgatcgcccagcacgccggcgacagccttcagttcgggaatgtcgcccgcgggagtcgaagtgccgtgaacgttcacgtagtcaatatcttcgggtttgatgccggcgtccttgatggcgtcgcgcatcgatttcatggcgccctttccttcgggatggggagccgtgaagtggtaggcgtcggccgaacagccgctgccgacgacttcgcagtaaatcctcgcaccgcgcgccttggcgtgctcgtactcctcgaaaatcagggcgccggcgccttcgccgatcacgaatccgtcgcggtccttgtcgaaaggacgcgaagcgtgcgtgggatcgtcgttgcgcgtggaaagcgcctgcatggagttgaaaccgccgacactcggctcgttgaccgcagcttccgaaccgcccgtcaccatcacgtcggccttgccgtaacggatggcgttcatggcgtccatcatgccgtggttcgaagatgcgcaggccgacaccgtgcagtagttcggccccatgaagccgtacttcatggagatgaaaccggccgcgatgtcggagatcatgcgaggaataaagaacgggctaaaccgcggggttccatcccctgcggcccagcccagacactcatcgaagaaagatttgattcctccgatgcccgaactccatattacacccacctgctccttgtccacggtctccagatcgagacccgaatcctcgacggcctgcgtggccgcgatcagagcgtactgtgtaaaaaggtcgtacttgcgtacttccttacggtcgaaatagaggctcgaatcgtaattctttacttcacaagcaaacttcgtcttaaacttttcagcatcgaaatgagtaatcggtgcggcaccgctgactcccttctccaaattcgaaaaatactcttcaatattattaccgagcgggttgatcgtaccgatgcccgtaacaactactcttctttctgtcataaatttaaggctataagaggctgtgaaaacctttggtaaaattatttcttgtgctcctcgatatagttgatcgcgtcacctacggtagcgatcttctcagcgtcctcgtccggaatctggatatcgaaagccttctcgaattccatgatcagctccacggtgtcgagcgagtctgcacccaagtggttggtaaagcttgcttcgggcactacctccgactccttaacacccagtttgtcgacaatgatttcgacaacttttgattgaacttctgacataattttaattttttagttaaacaattatttggaaatagttctttcttatttccgaggtaattttgcgcaaaagtaacactttttttattacttttgacaaaacgaaccttttttttattcacaactttttcgacatttagcacattttcacaattaaccgattcaaaaccatattcttatgaaactgcttctgatctctaattcgaccaatgccggggaggaatatctccgttatccgctgccggaaataggccggtttcttcagggcgtgcgcgaaatagtcttcgttccctacgccgccgtgactttctcgtacgccgagtacgaaaagaaggtgcaggcgcgcttctcggagctgggcatccgcgtgcgttcggtccaccgcgccaaggatccggcgcgcatgatccgcgaggccgaagccgtgtgcgtaggcgggggcaacaccttcgcactggcaaaaaagatgcaggagcaggggcttatgacggccattctgcgtaaaatcaaagccggaacgccctatgtagggtggtccgcaggcagcaacgtcgcctgtccgaccatctgcacaacaaacgacatgcccatcgtggaacccgaatcgttcagggccatcggcgccgtgaaattccagatcaacccccactacctcgacgccaatcccgaaggacatgcgggcgagacgcgcgaacagcgcatactcgaatacatcgaagccaacccgcgccgctgggtggccggactgcgcgaaggctgcatgctccgctacgaggagggcaaactggaactgatcggaaaacgcccgatgcgcatgttccgcaaaggcacggaaactttcgaaatcgaaccgggcggcgacctgtcgttcctgctctgatttccccgcccggagtgcgctgcgggcggtaaatgaatatatattatatataggtatgaaaattctgatcgcgggtctgggactcatcggaggctcctttgccctcgcattgcgcgaccgcgaaatagcggacgaaatattaggcgtcgagaagtcggacgaaaacgccgccgaagccctgcgtctcggtctggccgaccgcatcgtgacgctcgaagagggtgttccgcaggccgacctcgtggtgctggcgacgcccgtcgatacgattccgctgatggccgtaaaagcgcttaatcatgtgactgacaggcaggtggtgatggacatggggtcgatcaaggccgagctgtgcgaggtgatctcgatgcacgcgcggcgcggacgcttcgtggcggcgcatccgatgtggggcaccgagtacagcgggccgcgggccgcacagcacggagccttcacgggccgcaacgccgtcgtgtgcgaggcggagcgcagcgacgccgacgcactggcgacggtcgagcgcatcttccgcgcgctggacgtccccgtagtctacatgggagccgaggaacacgacctgcatgcggcttacgtgtcgcacatctcccacgtgacctcgttcgcgctggcgctcacggtgctcgaaaaagagcgcgaggagcggcacatcttcgaccttgcgggaggcggtttcgagagcaccgtgcggctggccaagagcgccgccgcgacatgggtgccgatcctgctgcgcaacaaatacaacgtgctggacgtcctgcgcgaacatatccaccagttgcagatcatgcgcaggatgatcgaacgcgacgacgccgaagggctgaccggcgctttcaagaaggccaattcgatccagcgcatcattcactgaccgcaatgagcacgacggccgagacgggacgcatgggcgaacgcgcggcggcggagttcctccggcacgcagggtatgaaatctgcgccctcaactggcggagcggccgttacgagctggacatcgtggcccgcaaaggggatttcgtgcacttcgtggaggtcaagacccgacgtgcggacggactcacgccgcccgaagcggccgtaacgccgcagaaattccgggcgctgacacgggccgcactgcgttacatggcctgcacgggcgaggagcgcgaagcgcagttcgacctgatcgccgtggaggtaatgcccggcggagagacggaggtgcgcctgattccgcaggccatggaatacaattggtaattttgcatttccgacaaattatactacctttgtcggactgaaaaaccaatgttccggaccaaagcccgaaacgaagccggtttgtccggcaacagataaaccgtaaaaatacttcaacaccgcaaaccgtaaataccgatgtggttatataatttcggcctgacatgctacgtctggatcatccggttagtcgccccaagacatccgaaggcccggctatggatcaacggccgcaaggacctctataaacggatggccgaaaccatcgaccccgcggcccgtatcgtctggatacacgtggcttcgctcggcgaattcgaacagggacggcccatcatcgaacgcatccgcaaggagcatcccgaatacaaaatcctgctcacgttcttctcgccttcgggttacgagatccgcaagaactatcagagcgtggattacatcttctacctgccgatcgacacaccgcgcaacgcgcgccggttcctcgacgcggcgcatccagaaatcgccgtcttcgtgaaatacgaattctggctcaacctgctctacgaactgcgccgccgcaaggtgcgcacctatatcgtctcggccatcttccgccgcaactcgatcttcttccgcccctacggcggcatgtggcggcaggcgctggagtcgttcgacgtaatgttcgtacagaacgaggagtcgaagagactgctggcggggctgggcttcgacaacgtgatcgtagcgggcgacacgcgcttcgaccgtgtcgccgagatcgccaaggccgccaagcacatcgacgtgatcgagcggttcaagggcgacaagcgggtcttcgtggccggctcgacgtggggtcccgacgaggagctgctgatccgcctgataaacgacaatcccgacatcaaattcatcgtcgcgccgcacgaaatggacgaaagccgcatggcacgtcttgcggccgagatcaaaggcggcacgctgcgctatacccagtgcaccccgcacacgagttacggtccgaaacagctgctgatcctcgacacggtaggcattctgtcgtcggtatacagctatgcgacgtggagctacatcggcggcggattcggcgtgggcatccacaacacgctggaggccgcaacgttcggacttccggtggcgttcggtcccaattaccagaaattcaaggaggcgcgcgatctggtgacgctcggcgcggcccggtcgatcaatgattacgacgaactgcgggcgtggttcgttccgctgcgcgacaacgaggagttcctccagaaaaccagccgcatcgccaaggactacaccacacggcatcagggcgcgacgggcatcatcgtcagaacgattttcaattaagcggagcggtcccggcccggaaaagtccgaaaaaaaatctccggggaaaatcttccggaaagtctcccggaaaaaatccccacccggataaattcctcctaaaaacaggaaaggccggaaggacaaggacaggagcaaggacaaaggccggccacacaagaaagccggaccgggaacgacaacgaaacaacaacgaaacaacaacgaaacaacaacgaaacaacaacgaaacaacagcgaacgggatcaaggaaagacggcggccgtgaaaagtcagcccccagcaggtgaacaacaaaataaaatgcgcggacatcgaagagtccgcgcattttcgttgacgccactccggccggcggcaagccgggcgttattcgtacagcgatttgcagtaatcccggaaggtttcccagcggtaatagggaccgccgccaaggggcagtccggcatcgcgctcgttgtgcaggatgcgcaccagaacgtcgcccgccgggttgcggaagaagatgaactgcacgttggccgccatgggcgaaacgcggtggacctgccacacttcggcagcctcttcgggcgtcgaaacgcgggccgaagcgccctcgacgcccagcagcgccaacagcgggatgacattcacgtcgtggccgaagcgcagcgacgcggccagctcctttccgccgccgatcacctcttcggccgtctcgacgatgttgcgcagcaggggtttggcgtcggcgatgatcggatcgccgaaacgcttcgaaggaccgaacatcacataacggcggaagttctcgtcctcccatgcggcatatatctcctccccggtgaagaggtcgtacagcgaaatgcccagataatcgacgtcctgcatgatcgcggcctgcaaaagcagctgctccatcagtttgcggggctttttgacctcgcgtttgacgaattcgggatcggagaaaagcgacttcatcagccggtcgggaatcaggcgcgcggcgcgcacgctgtcggccgttttcagggtccggtcgcgctgggcatcgagtcccttgttgttgcccatatagggcatgtagcgcgcgctcgactcgcgcgtggtccggatcgcgggattcagctccttgagccgctcgttgaaagccgccatgctcaggatgcagcgcggcacgagggtcgagcggctctcgatacggcattcgcggccgtctgccgtagagaaaacttcgggataagccttgtacatgcgctcggcgatgccccggtgttcggcgaccccgcgcggcgaaaggtcgccgtaacgtttgtcggcgtcggccgcgatgatctcgacgcggcccagcacatcacgacccagcggcgtcagcgcaccggcttcggcggctttgcgcaggattttcagcggcccggcatagacgctttcagaggcatgccagcggctgccgtggcggccgtaatggctgatgtagaacggcgtgtacccgtcgggcgccggagccgccgcagcgggccggtattcgtatgaatggtagattccgcccgcgcgttcgggaacggccgcgatctgttcgcgggccgtctgggcgtccgctccccacaagccgagcagcaggaacgccgcgcagaacctcagtttcaatgcaagtctgttcattggtcggtattttaacatttatgcgtcatgattcccagcacgagccggtcggtctcgttcatgccgtcgcggccgatggccgtcaggttgcggatgcacttgtcgacgtcctcctcgataattccctcgacgggcgtcacgcagtgaccgtccatcgccatcatggccgagagcacggcggtcgagacgccgctcgtgagtttcatcgaacaactgggcttggccccgtcgcagatcatgccggtgaggttggcgatcatattcttgaccgccgcggcgacctgctcgtaggcgccgcccatcaggtaggtgatgccgcagctcgatcccgtcgccgccacgacgcagccgcacaaggcagacagacggccgagactctgtttgatatagatcaccgtgaggtggctcagcaccagcgcacggatcgtatgttcctcgtcggccgcggtctcgtcggcatagaccaccacggggagcgtcgcggcgatgccctgattgccgctacccgaattgctcatcacggggatcatggccccggccatgcgggcgtcgcaggccgcggaggtataggagaggatgcgcgagaagatgctgtcgcccatcacccgccgctcccgctcgcagcgcagcgtgcggccgacgcagtgcccgaactccccggcgaaggcccgctcggcggcggctttgttcacgcggcgggtttcgaggatgaagcgcagttcatcgagcggcgccgtcatggcgaaatcccagacgcggcgcagggtcaggggcacctcgcccgcctcctcttcggcgacggatgccgtgcgtttgtcgagcagcacctcgccgtcgcgttcgagatagacgaaggcggtatgtccgcctgcgatcaccgccacggcgcggcgttctccggccgaagcttcgacctcgatatagagtttttcggcgatatcctccttcagcgagatgcagacgcgcttttcgtcgatataacgggcgccccgcccgacggcttcgggcgtcacgtcgcgcaggacctccagttgatattccgaacggccgaccagcgcacccagcgccacggcgatcggcaggccgatcattcccgtgccgggaatgcccacgcccatcgcattcttgaggatattggcgctcaggcgcacctcgatcttttcgggctgcgtgtcgagcagttcggcggcgcgcgccgtacacaaagccacggcgatcggttcggtacagccgatggcgggcacaacttcgcggttgataagggcgatgattttcgctcgttcgttcggggaaaacatattggctcgtttttagagatcatacaaagataactatttttcgctatttttgcggcatcaaaacagacgccgatatggaaaatccgaaaagccgcgcatggaaagtcgtgaagagcgagtacctcgcccgcaaaccgtggttcaccgtacgccacgagcgcatcgaactgcccgacgggcgcagcatacccgactattacgtcttcgagtaccccgactgggtgaacgtgatcgccataaccaaagagggtaaattcgtattcatcgaccagtaccgtcacgggctgggcgaaacgaattacgaaatcccggcgggcgtggccgagccggacgatgcgtcgatgctggccgcggcgcagcgcgaactggccgaggagaccggttacggcggcggcgaatggcgcgaactgctggtcgtggccccgaatcccgccacgcagagcaacctgacgtactgctacttggcgacgggcgtggagcggctcggcgcccagcggctcgacgccacggaggatatccgcgtgcatctgttcacggccgccgaggtgcgcgaactgctcacgggcggcggcatccggcaggcgctgatggccgcaccgctatggcgttacgccgcggagtacgggttgtagctaccctacgacgtatttgctgccgggcagcagcgaaatcagctttacgaccgcataggacgagacgaaggtgcagagcgccagcacggggatcttgatcccggccgaaacgatcagcggatcgagccagccgtggaagaagttgagcagcatgatgtgtatcaggtagatgccgtagctgagtctcgaaatgtcggtaacgacgcccgtaaaacggcccgcccccggcctgacgtctttcagcagcaggaacagcccgaccgacatcgcggccacgttgatcgtcccgaagccccacgaaagttcgaggtccgcgacgagccgctgcgtcgccagccgtgcgtcgaaaatccatgccgtcgcgaaataccccgcgacgaccagcaacgcaccgccccacttatgccatgcgcgcggcgcggcgtggtagcggcgcaaataggcggccagcaccatgtagccgaggaatcccgaaaagtagtagagcatcggcgtgtcgttccagaaacattcgccgagcagctccgggaaaacgaggtgcacataggggatgcacagagtgaaggcccaaagcgcgagataaccctccatggcgcggcgcgaagccgtctcgatccacggcgagacaaccggggcgaacaggtagagtcccaacagcatgtagacgaaccagaggtgtccgatctcgacgccgaaattgaccgggatgcggcagacgccgagcaacgctccggcggcatcggtccgtcccgtcaggaactggtagattgcgtagagcacgcaccacaccagaaacggcaccaccacgcgcacgaaacgccgggcgaaaaagtcgcgcatgcgctcccgcaccggaagcaggaaaaatcccgacaacatgacgaacagcggcacggcggtgcggcacaacgagttgagccagcaggcccagacaggttcgccgcccgcggcgaccaagccgccgtcggcaatatagtagaattctccggcgtgcacctgaagcaccatgtaacaggccagcacacgcaacaggtcgagaccgtagtttcgggattgaagtttcgtcataaaagtcaggcggttttgatttcgaaaacaaaggtaacaaaaaacccggaaatccgcagcccgacactccatccggtaaaaaaaactcttctccggcaaagaccgactgtcccggtcccacggagatgaaaaaggagcggttcaaagccgctcctccgattcgggtttcgccgcccggcctatttgccgaccgtctgcgccagcgccatgaaatagcgcttagggtcgagaccgagtgccttgagcagttcggcttcgggggcgctgccgcgcgtgatcgacttcagcccgtgacctgccgtatagaggttcacattctcggcatatccggcggcatcctgcccgcagaggtagcggacatgttcagccggaatactctttccttcgtagaccgacatatcggcgatatagaccagattcagcggtgcggcatagacgaaatcctgcgcgccggccaacctgcgcaggtcgccttcggcgacgcgcacgagtttccgcgccttggcgtcatagctgtagacaccttcggcgaaaaaggcatagacgcggaccggatagagcgccagcgccgaaggagccgtcagacggccgtcggcgggacggttgacaccccctgcggcccacatgacgcccgaaagctcttcgagcgaaagcgcctcaggagcgtattctcgccatgaacggcggttttctaatgcttcgtttacggtcatgcccgccttggaatcgggtttgagaagggcgatctccgcgccgtgcttcacttcggttctggtttcgggggccttggcctcctctttaggcggctgcgtgccgccgcatgccgcgagcagcaaagccgcacaggtaatgatcttcacagtcatcgtttctgaaatttagaggtttacatgcaaatataaagaatattttccaaaatacggaatgcaattccgctgccggatacctgcgggctggcgatttttcgtacctttgtgcaacacacaacatggagcctatgaatccgacagcagtctacaccgtcgtcttttcaccgacgggaacttcgagaaaaatcgccgcggcggttgcgcagggagtggcccggcacggcgggagctgcaatgcaacggcaaatacggcggccggagcggacgctggtacaaatgccgccacaggcagcgcggcaaaggcgttcacgacaatcgacctgacgcatgcggcgggaaaaccgcccgtgctgccggccgatgccgcggcggtattcgccgtgccggtatacgggggccgcgtggcgcctgcggcattggaaaggctgcaggagattcgcggcgagggaacgccggccgtagtgctggcggtctacggcaaccgggctttcggaacggcggtcgcacaactggcggcgttcgtcgccgagcggggattcgttcccgtggcggccggggctttcgtgggcgaacactcgtacagcacgcccggcacgccgatcgccgaaggacgtcccgatacgcaggacctcgccgaagcggccgctttcggagcgcgcatcggccaaaagcttgcgcacggagagaccggcccgatcgacgccgcaaaactccgcgagccgcatacgccgctgttgtcaaaactgcggttcatccgtttcgtgctggggtaccgcaggcggcagaaacgcaatccggtcgcactgctccccgcgggcgacgccgcacggtgcacccaatgcggccgctgtgtcgcactctgtcccacgcaggcgatcgcgcgcggcgacgaactgcacaccgacccggcgcgctgcatccgctgctgcgcatgcgtcaaaggctgcgcgttcggcgcacgcacgttcgaaacgcctttcgctgccgttctgtcgcgcaacttcgcccggcggaaaccgcccgtaacgcttatgtaatatgacaatcgaacgactgaaaaccccgtcggcaggcaagctgaacgccctgaccgacctctgggaagcctcggtgcgggcgacgcacgactttctcgcgccggaggatattgcgtttttccggcaaatggtccggcaggaagcgctccggggtgtagaattatacgtcatccggaagccggacagcaaagcgcctgaaaccggaacatccgcaggacaggagaaccggcacgagtcccggacatccggcaagacaggagaatcccgccgaccggagggcttggacgagaacgggatgttcgggggattcgccgcgttcgcaggtatcgacggcgatatgctcgaaatgctcttcgtcgcgcccaaagcgcgcggcaaaggagtgggccggcagctggtggaatatctcgtccgcgaacgcggcataaggcaggtcgatgtcaacgagcagaacacgcaggcggcgggattttacgcccggctgggattccgcgtcacggggcgcgacgcgaccgatccgtcgggcaggccctaccctatcctccatctgtcgctgggcgaaacgccgcagcggatcgtgccgatcccgaacctgcagaccgaccgggtcgatgtcgatttcgaatcagagccaaccggggacgaaggaaaataaccggagccggcgggtagtaaccagcggatgcgggccgaaacgagccgccgagcaacgcttccgcggaaacaccgggtataataacaagacggcagagcgaaaatccctgccgtcttgttgtgttggaaacatatcggttggcgcccggcctcggcacacgccccgcttccggtcgctattccatataaccggtaacggtcagcggagcgtcgcccacttcggcggtcacctgcgccgcttcgccgcgggagttttcatagcggaaggtataggtttttcccttttccagcagaaagcgcagggcgtcgttcatgtcctgccggggacccgccgtacggccgccgcccatctgctccgaaccgcagaaaacatcgacgttggccgccacgcgcgcatcggaacgcccggcatgcgccgccttgtcgtacatcatgaaggtcacggtcgcatgccgcccccgctcggcgaggtcatcggcataggcggcatagaggtcgcggtaacgctgcgtgacgttcacgccgtggacctcgcgcgaatcctcgctccacaccatcggaaaccagtcgcccgcgggccggaacgaaacggcgaaaatgccgtgagcccggtcgtcgggcgacgcctgtcccgcatcggcaaaaaaccatgcgtaatcgagtcttcccggaaaataatactccgtgaaatgccagcggccgtcgatccacacctcgacccagctgtggttgccccgatcgtcgtgccatgcgggagttccggcaaagcgcgcgggaatgcccgcagagcgcagggcatcgaccagcaggaccgaaaggcccgtgcaggaggccatatgctgacgcatcgactcggagggactctggttggtcttttcgcgggcggtgttgtattctacggcgacatcggcggcaatatgccggttgatcgagtcgatggcggcgcggacgtccgcggctccggccgcacggcgggcgaagcgggcgtaaaagtcgggccgccagctgtcgcgcacctcgtccacgacggcatagggaagcacgtcgttcaggaagaccgaatcgggcagcgcgcgcgtccacggatactcggcgcgtgcgcggtaggcatactcgacattctcgcgcagcaggtcgagccgcatcgtatcgcggtcgccctgcggcatataggctacaaggaaagccatccccgcacgccgattgcgcggagtttcgcgcagcagctgccgcaggctgtcggcgcgcggacagtcggccagcgcagcgtcgagcaggggttcgtattcggcgggaacgccgcagccgtaacggccgcaggcgcagaggaaaagtcccagaagcaggaggaaaatgcgtttcatcggtttaattcgttcaggatttgtcggatggtctgttcgtcggcgcagggcgaagcgtactccggcacgccgggacagccgcccatcgaaatctgcggattgcggtatgccatgccgctcggccgcatgccgcgcgcgctgaaatggagggcatcgacacccgtcgcggccagttgccgcacgttcgacggattcacgccgctgccggccatgatctcgatgcggcccgcagcccgcacgacgagcgcgcggaggtcgccgatgccttcggacgccgtattgcggccgccggaagtcaggatgcgggtgcatccggcgcggacgatctcctccagcgcatcggaaaggtcgcacgtcatgtcgaacgcccggtggaaggtggtctgcatcggcccggcttcggccacgagggccgccgtacgcgccgtatcgacccgtccgtcgggcgtcagcaagccgaagaccacgccgtcggcgccgcattcgcgggcgaagcgcacctcttcgagcatctgccggaattcggcgtcgtcatagaggaaatctccgccgcggggacggatcatcacactgagctgcaagccttcgatgcggcgcaccatacggatggccgcggccgaaggggtcgtgccgccctcgtagggcgaggcgcagagttcgacgcgcgcgacacccgcacggcgggcggtctcgcacgcttcaatggaataggcacaaagttcggtcgtcatacggcaaagataaaaaaacggcgacggaaatgcaagtcccggagcaccgcagaacagttgcaaaaaaacggaacgggaccgttcatacgttacggcaaaaaaacatcgccccagccggagagccgacggttcggccgcacgccgcaaagccgaacgcacgccgtaaaaccggacgcacaccgcaaagccggacacccactgcaaagccgaacgccgacggcaaagccggacgccgacggcaaaacgaaagcagagcgcccttacggacgctctgcttatcttcaggctgcgcaagcccctatttaacctcgatctggcgcgtggcggcggcagtctcctcgatcttcttcttgggaatgtcgatggtcatcacaccgttttcgaccttggccgaaatattctcgcgctcgatattgtcgggcagcagcaggctctgctggaactgcgtgtaggagaattcgcggcgcaggtaggtgcctttgcgcttggcgtcctcctccttgttctcggtcttcttctccagcgagatcaccagctcgttgtcttcgttgatgtggaccttgaagtcctccttggtcatacccggagcggcgacctcgaccttgtattcgttttcaccgtcgatgatgttgacggcgggagccgtggtgctgcggcgctcggccagccagttgtcgcccagaatctcgttgaaaattcccggcagccagttctgattcgttcttgcaggtgtcataattttgtcctccttggttttattcggtttaactgttttcctttttatcgccctctctcggagcggtttcatccgtagagggtcaaatcctgtgccagcgccgaataaatgcaaaaatgtcacgaattgtcacaaaacctgcaaatacgacatgacagaccggcaggccgggagcggacggcgcatttcataagtacgggaaaaatacgtaacttcgcggcatggaattcaccgaaatactgcgcggccgttacgggctttcggagcgggctgccggagtgctgatgcggcatgcgtcgcaaagcgtccacgcccgcaaggagatcatcgtcgaggagggacagcgcgatcaggagatccgcttcgtgacggaaggttcggcgcgctcctacgtcatgcgcgaggacaagtgcgtgatcctctccttcgcgttcgagggcgatccgacctcatcgacgctcggagcatggcccggcggcatttcgggccacacgatcgagaccatggagccgacgacgctcgtgcgcctgccgcgcgaggagatcgaccggctcttcgcggcggacgccgaactggccgactggggccgccgcatggccgaagagcagctgcgccggcacgaggagtatttcgccgacttcgcatggcgcgacaagagcgagcagtacaagcgcgtactgcgcgaatatccccaattattgcagcgcatcgcgctgaaagacctcgcggcctacctcttcctcacgccccaaagcctgagccgcatccgggccgaaatcaaatgacgaaattatcataaggtaacttttccccgcgccgaaagccttacttttgcaccacttcgaaaaaagtaaggaatatgcaacgagacagtatcgatttcagcagttcggacgtcggaaaacttttccggcgcttcctctttcccacggtcatgggcatggtcttctcggccgtgttcgtcatcaccgacggcatcttcgtagggcggggcataggcagcgacgccctcgcctcggtcaatatcgtcgcgccgctcttcacgctcggcacggggctgggactgatgttcggcatgggcggctcggtcgtggcgtcgatcaacctcgcgcagggcaaacgacgcgtggcggagatcaacatcacgcagtcgctggtgcttccggcgctgctgatcgccctgctcagcgccctgctgatccattggcacgaaccgctgctcctgctgctgggcacccccggcgaactgatggtcccggcgcgcgaatacctcgtatggttcacgctgttcctcgcaccgctggccgtcttcaacatcctgatgttcatcgtgcggctcgacggggcgccgggattcgccatggcctgcaacatcatggcggcgtgcatcaacatcgtactcgactacctcttcatcttcgtattcgaatgggggctggcgggcgccgccgtcgccacgggcatcggttacgtcgtcggttcgggcgtgatactttggtacatgttccgccgcagccggacgctccggttcgtgaagctcaagataagcggcaaaagcatgcggctcacggtgcgcaatctctggtacatgagctatatcggattcccggcgctgctgagcgagctggccatttcgagcctgatgatcgtcggcaactacacctttatccattacgtcggcaaggacggcgtggcggcgtacagcatcgcctgctacatcttcccgatcatcttcatggtctacaacggcatcatccagtcggcgcagccgatcatcagctacaactacggcgcagggctgatgcggcgcggccggaaagcgctgcgaatggcgctcggcacggcggcgctgtgcggcgcggcggcgttcggattcacgtggctatgcagtccgtggatcgtcgggctgttcctgacgcccgacgccccggcgtacgccatcgccgtgcagggactgccgtggttcgcggcgggctatcccttcttcgggatcaacgtcgtgacgatcggctactaccagagcatcgaacggggacggctcgcaacgggactcaccgttctgcgcggcatcgtgctgatgacgttctgctttctgctcctgccgcgtatagcgggcgtgacgggtatctggctcgcggtgcctgcggccgaggcgctcgaaacactgctgctcgtctatctgctgcgcagcagacgcttcgcattcgcataagggaaagcggaaaaaccttcggtagggttttcccgctttccgcgtcggaatggactaattcccgcgctgcatcctgtcgatgaacagcaccccgtcgaggtggtcgatttcgtgctggaaaatcacggcggtaaatccctcgacggtatccgtcaccggccgcatggtcgtttcatccagatagcggagcacgatgcggtcagcacgcagaaccgtccccgacgtttcgggaacggagagacacccctccctgccggcggaacgggtcgccgagcgaccgacgatttcgggattgacatagcattcgaacggttcgccgggcttgtcgaaacgctgcacggcgatcagccggcgcgaaacgccgacctgcggcgcggcgattccgacaccttcgtcggccggatcccgcgcggtgagcagcatgccctgcttcagcaggcggaaatactccgacctcagttcctccgcacccagcggcgcggccttccgccgcaaaaacagcgaatcggcacggtcgccgatccggcacaagcgcatgaccgccccgctctgcgaggcaatgacttcacattccctatcggtgaatcccttttggaccgcgcaggcggcgagcaggcaggcgacggttataacgaatctcttcatatcggcatgattccgtttccggcaaaaatacgaaaatatattcaccgtacggcggcacgccccttcggactgaaaaaaagtcttttccaattccggcaattatcctatatttgccgccatgaacgaagatctgaaataccggaaggccgagcctgccgatgcggagcgcatcatggagatcatccggcaggcgcaggcccagatgcgggcgctggggagcctgcaatggcaggacggctaccccgcacgggcggacatagaccgcgatatcgcacgcggatacgggtatgtgttcgagaagtcggacgcggcggagaaccccgcagctgcagaaacgccgcagaagtacgacaaagggacggtacccggcggcgtgatcgcatacggggcggtggttttcgacggcgaaccggcctacggggcgatagacggggcgtggctgaccgggggcgactacgtcgtcctgcaccggctggcggtggccgacggagagaagggccgcggcgtggcggcggagttcatgcgccgcaccgaagcgctggcccgcggacggggcgtcgacagtttcagggtggacaccaatttcgacaaccgctacatgctgcggatgctcgaaaggctgagattcgcctactgcggcaaaatcgtctacggaagcggtgaaaggctggctttcgagaaacccttcgaagcataagcgaaagaaccggtcttgagaccggttctttctgtgtgaagtcagggatgcgtcgcaatgttccggaacaaatccgccggagaaatcttataatagtcacataaatcggcgatcgtagtcagcgaaatactgtgccgccagctttcgatccgtgcgatattcagatcggtatcgaagcgtacgttctcctgagtcagcttgcgttccaaccgggccgctctcagctcggcaacaacctgcccaataaaaagtcatttcgccgctgctttttcatagcgcaaattaccggaataatagcctgattttttactacacacttgtagcttacaaaagaagtgccccgtttcgaagctcaatcgcgggcaggccgggaactcacacccgttcgcaccacaatcgcgccgtttcggaatgtcaggataaaaagaatccgcccgccaagacggcgtcacatcccaaaacgatcggtgtgacggtaaaaagattcccgtcgcaagctacaattatcacaacccccagcggccataatacagattcttcggaaaacatccggttccgcatggccggtaccgtccgtgcgtgcagtcacaacacgcgcggataataaatccatattacaaaaaataatggaataaaacaagtaaaacggggcaaaatcagcgcagcggcgggtttccggtgcggtttcggatcgggaaaaagaatttttccgagacaatacggagagggacggcctatcggcgagcggaaaaacggcggacgggggggggtagcagacggctgatgaaaaaagtataatacgggaaacgggagaaatcgctgcgaatttcgccggaaacaccgggagacaccggagacaccggagacaccagccactcagggaacagccgccccgcgcaacaccgaaaaacgccggcaaaaggtcctgacacaaaaaagcggcccgcatcgctgcgggccgccgatcgaccgaagagaaccgaaggcgccgctactcctcctcttcgtaatagaccttgtagaacttgcccttctcgtcctcgccctgttcgagcagactgcggttgccgtggacgtagatgtggaagttgcggtcgagcttgatgacgctcttgtaggaacgggcctgttttttgaccgccgaatcggagatggcgaattcgtcctcgatgcggatgtcgcggtcctgctcgtactcctgcttgtagcgcgagaagctctccatgacttcgggctggcggatcaccttctccgaaaagtcgtccagcgaaaagctgtcctgctccttgaagtatttcatcgtctcgttgagcatctcagcctgatcggctttcgacacctcgaattcgttcgggagatgcttggtcacgtacttcttgcacatggccatcgcgttgtgggtattgtggtagttgtcctgacgctggcgcacgtgcaggaaatcgtcgatccagtagcgggcttcggcgcggttggtgttgtccacgacgcagaccgcgaaacccgcttcgcgctcggtgttgaaaacgacgcaccccttgtccagcttattgacgttgatcccctgatgcgcggcgatatgcagccccgacgcctgctcctcgacgtcgagaaacgtgtcgcgcgtctcggacttgaacagcccgacggcatcgaccgtctcgcctccgaaacggcagtcggtgaagtagacgacatagaactccccgctcttgatctgggggtgcatgccggtttcgtagagatgtctggcaaggctgaccgaatggtcgtaaaacgattcgggatcgtcgaagatcctgcaggtgaaattccagacctcgttgcaggtcaggtcggtgtcgtggtagaggttgaaatactcctcggatttgaaaccgcccatgaaataggccagcagcgtctgcatcagggccgcgtcggagagctggtcggagagcgacggcgagaccatcagcggctcgtcttttgctttgttgcccacgatatgcacggccagcgcgccgatccgggattcttcggtatagagcattttcggtattgtttgcgtaaaacggaaggcaaagatggggatttttccgggaccgggcaagcaaaaaaccgggtatttagcagaaacgccctgccggactcccgataatttggctacttttgcaacgactaaacttccgtaagcatggaaaacagaataaccacactcttcggcattcgctacccgatcatcgcgggcggcatgatctggtgcagcggctggcggctcgcggcggccgtaagcgacgcgggcggactgggcctgatcggcgcgggctcgatgacgcccgacctgctgcgcgaacacatccgcaaatgccgcgcggcgactggcaaaccgttcggcgtgaacgtccccctgatgtaccgctacgcggagcagatcatgcaggtcgtcatggaagagcgggtcccggcggtattcacctcggcgggaagcccgaagacatggaccgggcaactgcatgccgcaggctgcaaggtcgcgcacgtggtgtcgagcacgaaattcgccctgaaatgtcaggaagcgggtgtcgatgcggtcgtcgccgagggattcgaagcgggcgggcacaacggccgcgaggagacggcgacgatggcgctggttccgcaggtgcgcacggcgattacgattccgctaatcgcggcgggcggcatcgccacgggccggggcatgctggcggcgttcgcgctgggagccgagggcattcagatgggcacccgcttcgcgctgtccgaagagagttcggccagcgacgccttcaaacggctctgcatcgggctggaagaaggcggcacgatgctggcgctgaagaagatcgggccgacgcgcctgatccgcaacgacttctacacggcagtcgaaaccgccgaaaaccggggcgcctcggccgaagaactgaaggagctgctgggccgcgggcgttcaaagcggggcattttcgagggcgacctcgcagacggggagctggagatcggacagatcgcgtcgctgatccgcgatctgccgccggcaggcgaaatcgtccggcagatcatcgacgaatacaacgccggcgtgaaatcgctcacgactctatagcggcccttcggggataggcgggccggcgaaaagcagccgtcccaaccgggacagtctgccgaagagacgccgggcctaccgccgctacatgccgagcaggaccagcagggcgaccgtcagaaacagcgcccaatggcagaggcgcaggtaacgggtcttcgccgcgcgttcatagcccagcgacaccagccaaagcaggaaccagccgccgtaagtcagcagcaggaagagttccagctggaaattgcggggaatgactccgaagccgagcagcagcaggaataccgctccgagggccagatccgccgtaatcatctggacgccgcaccgtcccatcagccacgcttcgtaggctttgtccgcggcggcgttccggccgggacaggctgccgtatagaagcggttccccgaaacgacatggacgaaaaacgccgcgataagcagcgtccccgccgcaataaaccatccgttcatacacattacattttgaggtagattccgtcgggcatatgccggagcagccacgccgcaatgcgccagcggcgggtgacgaccgcaacccgtctgcggcggcggaccgcccgcacgatctgccggacggctttttcgaccggcatcacccagaacagaccgtcacccttggccatcgccgtatcgacgaagcccggacggacgtcggtgatgtaaagcgggagtctggatttcgcggcgcgctgccgcagtccctcggcgtagttgatctgataggctttcgaagcgttgtaggccggagccgcacccccgccgcgcagtccaccgaccgacgagacgacgaccagatgtccgccgccctgccgctcgaaacggttgtaggcccagtccgcggccgccgtccagcccagcacgttggtaaggatggccgtctcttccagcgcgaaatccagcgagggattcagatcgcccgttccggcgcagaccacgcataaatccatgccgcccagttcttgggccagatgctccagcgccgcaacggtctcggcgggacgcgtcacgtcggcgacggcaaagcggtatgcagcaggatcggcctgcgcgatctccttcaacagattttcccggcggccgaccagccccacggcatatccctgcgccgcaaagcactccgcaaggccgcggccgatgccggaagtggcaccgatgacaatagctcgtttcatatgcgcaaagataggacgcggaaaacggaaaacacttgatccgaatcaagaaatcaccgcacccggcggcgaatgcggctcagcgtttcgggacgcacgccgagaaacgaggccagctcccggagcgggaccagttcgagcaggccgggacagcgcgccagcagcgattcgtaacgctcctgcggagtcgagacgtacgattgcagcagccgttcgtaaatctcggccagcatatgctcggcgacggtgcggcccaaccgctcgtgtgcagcgtcggtccggtagaatttttcgagccgttcgcccatcagcgtcagcactcggctgtcgcacatcgcttcgatactcacccacgcgggggcgtcgttgcgcatcgagatatagtcgccgacgaactccccggcgaaagcgtacccgacgacatgtcgctcgcccgcttccgtggcgtgcacatagcggaaagcgccctcctcgaccaatccgctacggcggttgcggacctgctggaacgaaaaacagccgtccttggggacgaagaggctttcaccctccctgcggaacagctcggcaagcggcgcgaattcggcggccgatatgtaacggttgaaatccatcgtcggcaaagataagtttttttgcggattttgccgatccggacgaattcgctacctttgccgccgcgaacggtgaaatcaccggctcgtcaaaacgcaacgcaagatgaaaaagcaaaagatcacccagcaggattacctcaaggcccaccgcaaggcgagccgcgaagaggaaatcgcacggcacggccgtccggcaaggttccgggccgtgcacaagtcgaaaaaagcatacgatcgcaaacgcgaaaaggcaggtctgagaaacctgcctttttcatttcatattaaaatatattcccactccagtcccccggcatgcttacgctttggaagattggtgcaacatatgcaaacagacgatggactcacattgtacttttcagcggcttctcttaatgtattgaatatctctccggtcgtaatgcaccttatcttccgattcctttgtcgtattgcctgcttcgatttgcaaactttacaaccgccgcccttcaataaactccccggccatgcgtgccaaatcctattacattcggcacattgcaccaatataggtttatttctaccaacaaacgttccaatgattttaattgcaggtgacaaatttgcgatctccgcaacaaattcatccggagttctccggcccctacccgaacatttcggacatcccgttctttgtcttggagatgttgcagtaagatgataaggttgagtagaccatacatatccgcatactttacattttacaacaaccttttccttcgtgttgatatattctgtcagtggaatcagatcgggctgcaatacgcgtaatcttgccacaaactggtcatgtgtaagttgtaaaacgccggcacacttagggcatccgacacccaaacgcaaagaagccggtattgcgttccatgtatggttacaggttttacattgaactttaatcctgtcattagctttcgtatattcgccgacgaccctgattttataattgattccgaagagttcttctttgaattcttccgtagtcattcgtcttgaatccattttggctctctttctaatttttacccattcatctgtatcaagaattgaatccaagccaaattccgaaaagagtctttttgtcatatcgatcagtttatttctattgctgacatgagcaaggtcacaatcagtcacaaagcaattatcaaaaggaagagtctcattatcataatgatcatatatggttacaagcttgattcctttttcattacatatccgatgtttcttcctatcccttgccaccagatttttatgccaataccacgaaccgggttctatagccgctttcaattcaggtatgtatatgtctaactcagcccctattgcggttttatctctagacaggaccttggattccccaagaacacgaacaaaagaatgatatatgaactgctctaaaaaagaggtacatgctctgtgacaattcggacagccccggctatgcagaacatcatgaggtgttatttcatattcatatccacaagccttacagcgtagtggcatacgtgtacgattgttacgatactccacgcctttcctgacgacaagattcggatcgatttcatgaagacgctctaaaaacagttccattgtcagacgctgggatgctcctcgacgagagagtgcacacgccggacatcccctgccactaaggatatgcgcaggagtgacattccactcatgtccgcatttcaaacatctgaatttggctttttcgagcgcttttacatacctaccgatcagcacgacgtcgtctctttgagattgcaattcctcaacaaactcggcatgggttttctgcttgactctcgcacacttggggcatccatgcccttttaacagactatatggaatcggagtccactcccaaccacagatgtcacattttacagcgattttagagttgtttctttcatatgttcccagcacagtaattttagaattttgtgcgttcaatttgtctatgaaatctgttgttttcatttcttggcaaaacgaatttaataaaaaaaatcgttcactttcgagagtttgtttattacttcgaccaccaagcagccaagacaaaaaggtgggaaaatttgaagatgcaaacaatttgcagacaaaatcagacactgaaaagcgcaaatagccattaaggctatttgcgctttaataatgtggtaccaccaggaatcgaaccggggacacaaggattttcagtcctttgctctaccaactgagctatggcaccatcctgttgagttataaaactcgtttacaaatgattacgaaactcgatctttttctctgacacccgaccttttcagttcggtttacaacgtggtttacacagtcgtttttgcaaagaacgatacccatttcggtttcattgcgagtgcaaaggtaagcaaatttctcaaacttgcaaaagttttctcgaaaatttacaacttttctgccctcaaacaatcatacaaccgcgattagaaccgctttctatccaacatcaaccttttcgcaagtcatttcaaaaccatccagaaccgttcgggcaagtagatattcttcacctctcctgcctgttcaaacagcggggcaatctcggatggactaaaccctgctatcccgcaaccgatttccgtcaccaaaaatttcagttgtggatgttgctttgcaaactcgataaactcgtccacatagggctggattgtttccactccgccctgcatggtcggtatggcataactctgcccctgcaatccgacaccctgtccccagacagccccgaatctctgatatgccaaccgtgcagcacccccgccgtgcatacctgcgaggttgctaccgaacacgaagatttcgtcgggttggagtttagtgatgtaattgggtgatttttgcatggctgtttatttactcaaatgtcgaaattatttggtaagattgcaaattccactaaagaaaaaaatccccgaccgtatggccgaggattagcattgtggttcttcatattttggtgacgtaatttcaaaaaattcattttatatagcccttgaaaaatatgtcacttgattaacaaagcatcatatcgtgtttgataatcatagctaaacagttcttcatcagagcaatccttttttaatatacaatccaactcaaaactgctacatattccatatccccaatatctgctctttatttgaatcaattttcgtcgcttgagattattcgtacaattatcataaacttttttgagcggcatcggtaattgtgctgatacttttctacgttcagccatccatttatcccaaaagcgcatatcattttttaaggcacattgcttttcttccacgctatattcctcataacctgaattaatcacatcaaagaaatccgaatatgctctatgtaccattttatctggaatcaccctatgtcgttctgtcggctgataattggaatcacccaaagtaaaataataatccaataatgaaatcaatctctgctcgtagctttcaatgaagaactcgccatacgccagtggtgctcctgacccaccatgtttcccgacaactaatttatcgcatatatcatgtaaggcttcttcatattctttccatgcacaatgttctgcaattaaaatatccttaaactcattgttacaatccaacagtcgattgttgtatatttctaccttacattcatgtaatttggtcgccaaccatgcctgtatattagcatcccattgtgagccgagcgagtatgataataatgaatcaatttgttccgaaaatctttggaaattttctgtttccgttgtagaagaattaagagggtaatattcattaatacgccaaagaatcatatctaaatcatcttgataaggcgttgttttattcgtaaaccataaagtagcaaaatcatttaccgccgtgatatggggtatatctcggaaatatccgattctatcatagaaaccgtaacgttcagtacgatgcaaactatcgaatcgtcgttgatattcagctatcttgtcttttgatggcttgccaaataaataagggatagaatcggcatctctccacttaaacttaaaatggatggtatcataatatgtcttgattgtaagttccgttgaatcttctccaacctgctcaatctgccttacctgtctattgccacatccaagcattattaagccaacaacaagtatcagtatgtagttcttcatcatctgtgacacaattataagatgttcagtttatatagcccttgaaaaatatgtcacttaatctttaccgacttttcaatctctttataccaacttatttcatcatcccattcaatagttctaataattacataaccttttctatcggggtctatccttactaaatcggggtcgttcccattctcttcaccataaaagctatcgtgtgtatatagatttactatttctttccatttgcctccacgaagtgagtatacgcaatacattccaaagcgtgaaacagctcttgtgaaaaagcctatttcatccgtaccatcgcgattcaaatcatcctcgttggttaagcgctcaatctgaaattcagtttctatggcaggaattgttggattgctgaatgttatattattgagcttcccatcatctacttcatcaaggctgtaatattcagcagggtttgattcgctgtaagcatattcgatctttccatcaccgttaaaatccccttgtatagtatctcgttcataactatctcctataatcgaatcggtttgttcagtttgccttattctattttctacaactatattcgctggattcctattcccacaccctacaatcagcagggcgaatatggggagtaagtagtttttcatcttatgtgacgcaattttgaaaagttctgtttatataccccttgaaaaatatgtcaccaatgctataaatgcctgttaatccttttttgtaattccttatctttatatccgttcttcttggctcgtttcagccagaatttcgcttgcttccaatcttgaatgtcggcataatagtatgctaaatcccgctgggccatccattcatcctgttccgccgcccttaaccaccaaataacagcagaatcaatatctgcctgctctcgtttaatcaaatctgggcgttctgcatagcaccctcccaataaattttgagcttctgaatttcctgcttccgcagacttaaacaggctttcgattgcggtatcttcatctccatcaccgaaaagcatccaatgaaagaattggtagtattgttcatcagccaatttctcggcctctgtaaatggtctttcgggttggctttggcaacagacgaacaaaatgcccatcagtataagtaagtagtttttcatcgttcgttttcttctttgcaaaacaatcctttgattttgcgccatatgttagattgccaacaattaccgtattctgtttctgcataacccaatgtgcggacttgatagcttttcccgttggaatgtattatttgcagatttgagtggtacacttttgtactttctatacgaatagaatcaccattatcagccacccaccaagaattatctttcggaaaatattggatagtccgcattacaactgaatccgtccatatcttatcatcgggatttgtaacgcttaataaatgacaactccattcttctccgttttgtattaagtaacagttttcattaccgtatattctggcttccattatttcatcaccaaaaatattaggcatggcaatcgtgaaatcaaacaatagtacaacaatcagtaagcctattttgctacctctgtctaattttgcatttttctgttttacaaagaatattggcaaaattgaagatattaatacgctaaaccatccaaaatgaaagagtatttccagatatatatggcgcaaaagtacatgttcggagtagagataaaatgcaccgactttccatgctccaatcaatagtccaagccctaatagaaatgcactaaaatagagccgtatattgggacgtgacagtttgcggatattcacccagataagaatagccgcagccatcattagtaaagtatatcgtaatgttggatgcccgtctatcagtcctccatcactccaataatgaaaatccagataatcaaggcaataattataggcaatataatagattgtcaaactccctacgatgtaggcagttcttacaagtatgcttttaagcgtgggattgaggatcatggattagttattgagtgggttaattcattgatagaacaagtgacgcaatttgtaaaattctcttttatatactctttgaaaaatatgtcaccaacgaaccaatagattttctccaacgaatcgctcaattagagaaagtctattgatgtcccttattttatttttgcttgataatcaattttgaattgatattatcaatagttaccgttccgaaacgttccaaaacagtctggccgagtaatagcggagcctgctgattatggacaaccgaagcatcaacattacgcagaatggcatcgccaatcttgatttcacgcagacggattgtcgtgccctcgtgaatctcgccagttgcaacgctataatattctttgcctttaatatcgtctgattttaaatagccatttttaagcataaaattggcttccaccgaggagattgtaaccgtacttgctcccgtatcgaaaaagaatttcaaaggcaattcattaatcgtacaaggtatttcataaaccccgctatacatttttttcatttgtatctcggaaatagtttcgatcttatcttctgcctgttcatcatcggcttctattcgaataggcttggctttatattcttcaattaaatgcttaaattcgggcagttctcgaatggcatctatatcgtcatcatgctcgatatgtgcaaacgaacgatagcctttctcaaaggctttgcgaagtgccgcaacagattcgtccaatcgtcccatgcgtgccagcagacatgatttatcgtaataaacaccgtttcccattgaatccgaggcaatgattttatccatccattcgagggcttcggtatcccgtcctaaaaagtgaagagcatattggcgacaactgccactttcggcaaccgtatcctgtcgaataacctcctcgaaatccgcattgctcttctccttttctccacgtttcaagtacaatgcaccccgcatcaagaaaatatagggatatgttttatcgacatctattcccgtattgtaatctttcatggccgaatcatcatcgcccgataactcatagcaccagccgcgcttatagtaggcataagcactcgtcgggtcaagctctatcccttttgtaaaatcagctatcgcctctttatattgcccgccctctcggtaatagtcggcacgggaaataattgcataataatctttaccatctcccaattcaatacacttggttatgtccgcaatagcatgttctgtgtctcctatttcgttgtagcattggctgcgactgtaatagatgaaatcaaaacttccgaactcttgttgcagttgattgtagcataaaatagcatttgcataatcatagccccatttgtaaatatggatacgcagttgtttccaagagtgatcgttatttttttgaatttgggcctgcactttggctaatgcgtaactcaaatgtttacccataattgatttcagcaggtaatgttgtggggcatccgatttttcaaaatagatgacagcatcatcaatcgccttgtccgtttcgcccattttatcataaatctgcatccgataacgataggtttcctcgtaatcagcatcgtatttttcacatttattagctaattccaatgctttatcatattccttacgcgcaatcatgttgcgaataagccccaccatagccgattgatccgtctcgtcgtttttcagcatttgtgcgtaatccgcatcggccttgtcgtattctttctgctcgtaatagagttgtgctcgtccgtaaagaatctcttgaatattagttgctcctttcttgtcttttagtgctaatttgtaagcggtatcatagtcggcaagtgctttggcagaatcttccatatcgcaatatgtgcggccacggttccaatacatgatgtattttgagaacattccaccttttttatagtattttatcgcaaggttcgcatccgaaagggcatttccgtatttcttttgtcgataatataaatctgcacgaactattcttgcatcggcattgtcgggagtttcttgaagctgttggtcaaggcatttcatcgcttctttttcgtcgccattctgtattaggtcaatggctctttgcaggtggtaatctgacggctgtttcttttgtccatagccgttgtatactcctgcacacaacagcagaatgatgagtaggtagtttttcattggactattttatttatctgtaaatggatgcgtgtgttgatgtgacacaatttgtaaaattctattttatatacccctttaaaattatgtcactcgtcttatttgtccatgtaacatcctattacaattgcaatgacattaagcaagttataagcgattattaatcccgatgatagggataaagtggttaataaaaaataagatgcaacacataatccgatgggtaaccacatacctgcttcatttccgtcagaattttgatacacaaagcattgtatcacaaaaacataacccacggcaagtatgcaatatattaaggcttcgtgtttaatcatatctgatacaagcatatccattggattggaatagttcgcagatacaatatctttaatgagccatccaagtaaaatatagattgctatacctaatatcgttaagagaaattttttcatattgatactgtaccgagttatgatttattcaactaattgtagctgtccgtccacatacattgcataatagaatttcccattatgctttatatttttcgttttgcaaatacgaattattttatccaatttcatcagtagaaaacattcatattgaaaagtcactcctttggttggttgctccttatagattccacgatacatgctttgccaaagtttttcattcccgtttttcttataacgaatctggccatcagcaatagtgatagatgcgttttctgggtcatagtttccataaggagttaaaacatatgctattcgatatgttttataggtctgcgctgaaagtgccaaacaagatattgacagtatgagaacaagtgataatttcttcataatgtttgtaattaggagagtgccattattatacagataataaagaaaataacacctgcaatgatgccaacgcccgtagcattcatttctttttcttctgctttttgcgctcttacaactctttgttcatattcgggagttcctcttttttggtctaacaaccaatttgcatggcgaatcatttcttcggcctgttgttttgtataggcgtgtcctattctttcgcctaatctattgcgacattcgtacatcataattatttatacggctgaattaattcgtcattcaaaatgtttttcgacttattgaaatagttttgtgctatcgttgtatctcctaacttataggcagtatatcccatccaataataagccttttgccctgatttacgaatatcttcatcattggcatattcacttgataagagatcattgtagttcgagacacacatagaatagtaaattgatgcctctttataattgccgctatttaaataatgttcacccaaggcttcattgatattgtaaagctctaaatctcgatcagccttattattgattctcttagataaaaccgctaatttcttcaatgccgaaactttacgattggattgttgggtatattcagatgccgataatcccactttattggttttataaatttccaatatatccgatagcatgtcaacctgcccccagagtaaatccaactgctcattaacatcaccgattcgatctatatatttatcgacgacggcacaagcctccaaacaatagattgcataacgttctgctcgttccgaagttattccgtaagtgctatttccatcaacccaaacggattttgcttttacaatgagcggctccaattcagttatacaacgatcaacaacatcttgtgcgtttgtatatgttgcccccataacaagagcaaacatcaaaaacatctttttcataaatcagcaattttatttgtgttagtagattttgatcaagacaacatagggtgtcaatcgttttatcttttctgtaaatggcaaccctgaaatcgagttattagcaggtaacgtaataaatattggtgctacatcaatcaaattcttcagataagatgttttaatagcatacccgacattctgtgcatcttcaacccctgcgtttgtaatgccaactatattgccttgtttatcaaacagaggccctccgctattaccatgctgaataggtgcagatatttggtatgtaacaatatcaccttgataacctgtttttgaacttatgataccatcggtaacttttatttcttctcccaaaatatctgacatggggtaaccgagagcaaatacactcgttcctacatcctgtatcgagattttaacggcatagggtaatgctgggaagttggtaaacgagctatcgtcgatttgcagcagactaatatcattcgtcttatctgaaatcagaacttttgcattgactgtatggacctgtcctttccaattaacaagcacatctattccatttgctccatcaattacatgatggttggttacaatcacaccgttagatgtcaatacgaaaccgctgcctgttgctatgtaccgtttcccattttctgaagacggagtattgggcgttgtggctttatccagctccatttctcgaattaatgccagcccctctgaaccgccttttttcaaatcgtcaatacctgaggcatcggatttcagcagtttggcttttcctcgtaacagatagacgtctgttgtggatttgtaggatatggctttcgtgcagtcgtcaattgcgttattgtaaaacttacttgcaaaataggcatttgcacgtttgaaatagatgtcgtagtttttataacctctgtcaatggctttcgagtattccgatgccgcttggtaatagtttccatcacgcatacgactgtccccagcagtaatgaaactcgacacttttgaatatacggatttgcgctctaccttgagattataaacccttatctttgcgcctgcatacaaattgaactcaactcgtcttacaccatcaaccgatgcaaaatcggcctcaggaatagaataatcattaaaatttatcccacaatgattattctcttgcaagataatctcaactttcgttggtaatccagaacaagattgccatccattatcaaaagtaccatgcaaaacacctttgcctgacatattaaaggaacaagatgcagattggtatgtatttacaatcccataattacccccttttgctcctttattgttaaatagatactgtatatagtattctttaccatctacgcccgccatatatactgttattccccaatatatatcctgcgtatattctgttttcccgtttgcggtctgaacaggatatttatattgtgatggattattatttatatcttcaatgccgaacgaaatccgcttggatgtaccattcacatatagcggcaagattccattgcgtgctgtaattctgttctgttttttattttctttcgattctgcgatccaattatgtaatgttacgctattggatgacacatttgatatatccaagctattggatgcgtttattttcagagtgctgggttgtatttcccactctgtttgggcataggaacttatgccaagtagtaatgatagcgtgaggagaataactcgtttcatttgttatgtgtatttgattaatatttatcgtatagtttgtatcgtttgggagaactccccacggcttcaatcaagcaaaggttttcaggaatatggtatatgcaatcatagccctgccttgcggttatcggatggtcaaactgcaaaataatacaatctgcaatctctcgaaccgttaaagcgaccgcagaggcagataaaatcgcattgcttatttgcctgtgtagatactggggcatacacaaaacttgtcgttcaacccctaacgacgggttaataaaaagaaagcgcagggctgatgacttattttagtgcgacaggtcgtaggaaacccaatagataaaataagcaacaaccccgcgcctgtatcgtgaagatacgacgggagggcaatgccacttatcctctctattgtgcttggaatttcctacgttcgtcgcacgagaataaagttacacttccgtattcaatatgttctccacaaaagtaaaaaacaatcatcggaaatgcaacggcaaaaccactcttttttcaaggttgttgcagattcaaatttcgtcaaaacaaagttgccaaacaagtggaaaacggctggaaaataaactttgtttcttgtaacttgggttagatgctttgttattcaatttaagccgacatatttcctttaatagtgagttgcaaatcactccaacccttaattatcgagaatatgccagcgtaaagtcgatattttgagcatcggaattatataaaaccatataatgcgcaataaatcaacagacagcatcattgaatataagttattatcgtcttgtttacctatcaaagaaaatacccctgtcgtcgtttgacagcaagggtattcttcttcgttcggttattccacaaaccacctgtactgggcatcgccctcgatggctttgcctatacctgtgataagctcggtagcgttcagcgaacggtcgaggaatgtatctatgtaactcgacttgttggctcccgtaaagaggttataaaccctccaaaggtcaatctctggattgttccctctggaaaagttctcgtccgcgtaatacgcctttgctaccgcgttgatatggcagtccgtaaactccatagcaggaagctgtcgtttctcggctgtgggcaggtattgatacaaccgtgtcttgccgataagctgggcgaactggtgttcggtaagggttcgttcctgcatcgctgccatcagttgtacatggcgttcggcatcgtactctcggaacaggcgtaaggtggcatcgaacaagtcctgcacacccatcacccgcagttcgctcttgaatccatcggtcgaaacgcaaaggttacagcacacgaggtttttgaacccgataaagaccttgaatttctccaccgtcttcttggaataaagattctcgtggttataggcccttactcctcctatcgaaaggttcagtctgttccctgccacatcctcgtaaatcgtgggtatctcgaaacagaaagccatccgttcgtagtagatggtcttgtcggtttccaagagctggttcacgggcttgtggatggcttcgggaatacgccccttgatgatatgggacacgactatatcgggagcgtcgattacctcctgcgggaacatacggtgtgcagcacccagcaccgtttcgataaagctctggtgggagatggtcacctcgttgtccttgctgaatacgggaacgacgcaatccgctctcaaatgggctatatcaacaggcttggtgttggcctcgataaagtgacggttatgacggacgcccaaaggaacgacaacacccgtcgttgctgattgggctggttgttcctctacaatcgttgctacctctgcggcagggttatcgaggaaagggctgtcggagttcaggccgacggcaaattcggggttaggctgaaacgctgggtacatggttgtaaggagtttgaggttgaacactcggatgtgcaggctgtgtcatgttgcaccatttgaggatggcctgaccgacagcgggcgtaatgagaaattcgggacggcccgtgaacagtcccgtgcggtctttggatgtggtggccttgtggttcatggctatatcgaggacggcggtaaactcgtaatccacgttatcacgctgtacggctttcaagcccactttctctggaaccatcttgccgttcttgtccgagagcacataatcctgcttggaacgcatggtgcagatcacatgagcggaagatgtcaaaatacgctgaataaaggcgttctgacggggtgtgaccttggcccaattggcaaaggagttgccttgcaggttggcgtggaaatccagcagataatcccagcaatgggaaatgctgtcgatgatgattacctcggctcctgcctgctcgcaaataccaatggcctcgatgtaggtttcgggagcatagttttcgagggtgaggacttgataaccgcccagatgggcataaaggtcagccgagcaattctcggaatcaatgacggcgattttcgaccagtcgcctgtcatgccgtaagcgataaggagcgacgaataggttttgccgctgcccgaagctcccgccagagcaagccgcatcttggccgcccgacgcatggattgtcgtaattgcataactctacaaattagatgattagtaaattattaaactaaaaatccaattttggagttttggtttgcaatccttaataattatcattccccatttcaataagggggggggctttaacagaaagtatctgtatatgcaggggatatattttataaaaaaacaggcattatagcctgtttctgataaatgcctacggtgcaatatttaaagaaaaaacgaagtgtcataatttttaaatatcattataaaaaattatatttgttattataactatatcacaattcagcaacaatgagaagaagtgaccaaaatgaaggatgccaaatattggtaggttatattatgattttaataattttgattaaattcctaatatttattgttgaagagattattgattaataccactctttataaattcggattcgattagtgacgcaattttcaaggggtatataaaagagaaattctaaaattatgtcacactctgaaatttcttcgcacccagtttccaagttcgctttgtccctgtccgtgcttcggttgcttcaaaatagagcataatcgaattgcctactccccgtctatcgtattcgatggaataactgtcaaaaatcgctttcatcttcgaatttatctcggaggtcttataaacagtattcggagcaaaggcggcatagacttcattaatgacactttcgtctgtcgcttgttttaagaatttcacccgttttatctctgtacggacatccgaatccacaaaattcaactctcggactttccgtaatcctatcgtattatatgcgtcgtaataaagggcatattcgcgttgcaactcttttagaaattccatatcatacgatttgctggacaagcatatacgggagaatattgaaaataagagcgtaatccgttctgatttcaatctggtcttatcatccaatatctttcggtcattgtccgtataggccgcatattccgccttggaaacgactttaaatgcaccgctgcggcaataggctttatggaggattgcaggataacggtatagcattttcaaccgttcgtccagataggcgttgttatagcggaaatagttgatttctcccttatccgttacaaatcccaaacgcttgtattccacccgttcgatagcttggtctaaaacacatatttcaccctgcgtcgtcaatgtctttctcaaatcgagcagtttgtgaaaacctgcgtgttcctcccgtaaaaacgtttccaattccgttttgtctttacatatcatcttggaattggtattggtgatatgggtgattttacctgtcccgttgcggaatctgcccacaatctgtatggcttccgtttctgggtcgatgagtgaatagggcgtttggttcgggagtaccttatagacctgtgtaatcataataaccgcaggcttataatcgagcgtaatatctaccgctgaatagaaacggcttgtaaagaaattgtatttgttcagtacggtttttccgctcttgtccgtcacggaatcgaaagccttatatccctctttatggagttcccgttgtgcttccgtactgcaatagacattcgtgtaatctcctatcttgaatgaatcaatcaattccttaataccctgcaccgaattatagaatatacagattggagtatcttccatgttaagactgttcaatgtctgttttagcatgacctcgacattattggtcggcttcaactccaattctttgctgtaatcgtatgtcggtcttatcttgataattttaaattcctgttcttcaaagcgcgggtcatcaatgacaatcggagttgccgataccatcgctttattggcgaacttaaagaaatcatcaatcggcaaggttatatgctgtcgataatccacctcggcgacgatcttttcacattcatcgaacagcaggaaatagtcttgcagataagggatacgcaactgtttgagtgcatttatcactttcggataactgtcgggagtggtcattagctttacagggcctgtccgttctgaaatccgttgcttgaccattgccgccgacatcgtttcgccgtacacaccgataatgttcggatgctgttgttccttgccgattatgacgggtacattcggttcaatgataatcgagttgcgttcggaatgaatctccagccatgtagcaccgacaccgcagatagtcttgtcgataatcgtattggtgggtatctctttaaataccgcgtccaaatgctgacctgcggcaatatcccgttcttctatcggtagtttattgttttgcaggtcgggaatggtggtcgctacaaatgaatagacatagggagtagtggacgccagcgttaccaataaatccgcttgtgtcaatgggaagaatccatagtcgatgctcccgaacggatatttggccattacatgcgttccctttactccgtcctgttcttcattccgaaaaatagccgcatcccgttccaactcccgctttatatgcttgtaaaagtagtccgaatcgggattgggtttcggaatctccaatggtttaaggtaggtcgggaagccttcgttatgccctgtaaacagatagcacaataagaatttctcgaactcgggtgtaagccaaacagaaatagcagatggcaggtcttcaacagctatctttatataaaatctgggaataccgcgttcaagttggagttgcccgttaatttgcactccatcccgcaccatcttatggaagatatggcagtgtcgggcattatccgagaattttagtttccaaaattccagttcctttacattataaccaatgatgggtggaaggttatccatatcaattttcataggaatcagaggagcttgtttagtttctcatcgaattctgccgtcgtataggggaatgtgccgtaattgattcgcccataccgatatacagccttatattcttggctgacggtattatatcgaccgacgttcctgtccctgtcacttttgaacaaacgcaggatataggcttcatcgacattcttgtctatattgttgatttttggatagtaagaacgtttattgccacacatcaggtaagttataacaaagtccacaatgtcggagttcagatacaaccgacgcttgacattgtttacatcttcaaattcataataggccatgcccgattttacacgacaggccaaatccaagtattgcgctttccccatcagtaaaaaaagcatattggatgctgtttcattgtcgatggttaataaagcagatgcaggaacggctttcagttctccgaactgtgcgttctcggcatccatcatttcttcatactcggcttcgcttacataactgttcatagtaggtataggtttattggttagtcctttaaagatagcaaaaaaataagagattgtccgtttccagacaatctcttttgggtagtgacgcatttttttaggggtatataaaacaaattttccaaaaatatgtcacctgtcatagcaaattctgcatcgcagcgtcgatttgagagttctcaaagctatccaagtaaatttgcgtaaccttttccgagctatgtcccaatgtttcacaaatcagcgaggtgctgacacccgaccttttcagtacggtagcgaaggagtgccgagcaacataggtggtaatatctatcggcagattcaattcctctccgatctttttcaaccgtatattcactttggcaatcaccttatgcacgcggttgtgctgttgcgtttccgtcttgtggaacgaggagagaacaggaaacagataaggcaatgatactccattgtagcgagcgagaatcttcaaggcttccgtctgcaacgggagcttgataagtttctttgtcttcttacgaatatagaccaaccgattgtcgatgatgttcttctcggtcagatagcacatatccacgaaattgatgccgcccatgtaataggaaaacgcaaacaaatcgactgccaactgtacccgtccatcatccgtcgaatagtgaacgatgcgtaaaatatcatccttgcgaatggctcgtttggctgtctgctgatgcaggcgcgataccttgaaactgcggaacggatagtattcggccttgacgattttctgttcgatagccagattgtagagcatacgcaatgaacggaatcgaatcccgattgtattatccgccaaccctgccgaacgcagccatgtttcatagcgtttgagccatgtaacatctatctctgaaaagtagatattcagatgcccgttgaaccgcatgagcgaggtatatgcctgccgtaccgataaggcgtaccctgttcgtttggccgcaatcaacgcttcgatttgctcggtaaagagctgccctacggtcttggtcgtatagccgccacaaactttctcgacgagcgtattggccgtaaatgccttttcctcgcaagtcagttcaatcaccttatccgtatattcccgctgtttgtcggcgatatacttttcaatatagattcggttggggcaattccgtttcggcctgctcttgtcaaaatcccaatatcgggcggccaacgaaatacccatgctgacatatttgcgcctacgctctttcgttacgcagagcatcaacggatgttctccgttcgcaagtgttttggaacggtataaaagtacgtttactcccgttgcagacatcctcgtttcggtttacacatttggtttacacaagttgtgtaaaccagtgtattttcgaccgatttcgagggacaaaaaaaagatgatcacatttctgtaaccatcttgtatttaatgttttataagtctgtttcaagtgcttgaccgaggcattttcagtcctttgctctaccaactgagctatggcaccatcccgatatcggggtcaggaatactcctttccgtattatcgtggtgcaaaggtaaaaattctttttcaaatctgcaaatgcccgctgcattttttctgcttttttcagttgcggaaacatctcacgccctaccccggcttcacaaaaaaagggaggagccgtcgatgctcctccctccccttgatcaataatgcaagcgatcttacttgagcatcactgcatttgcattaacggcacgccgttcgaacgacggcgccaaagtcaattgcggaacggccggcttcatattccggtccgcagcagctgcaaatttacctgccagcatggctttccccttaacgggggcagcggccggagattttttcaccagcgtaaacggtccgaccggatagtcgtcggccgtaaacccggagtcggccgtcggattatacttgcccagatagttggacccattgtaaacgaactggtccatcataaccacctcggcctccacatcgcccgtaagagtgagttcattgccgataaccttgccctttccgtcagacattatggcaccgatcaggcccacataggaaccgcctaccggataataatatttaccgcttacattcttgtcacggcaaagagcgacatagcgaacggtgccgtctccggtagctccgatctcctgatagctctggatcatgatataaccggtttccttgtcgaaagtggcaattgcggggaaccggtcgcgataagccgagatggcccatccggtaagcgcgaagttggtattggcgaccttcgtggagaaagtgacgtcgaaggagatcggcttggcagacttcatcgacgtcgtactcgtcacggtccacgtaccgagccaagcggcataagcctcatcgagttcgggagccttctccgtagtgaattccttcctgaaaagatccgtcgtagccagaaccacattctccgtagcgacgatgccgaatccgatgacaacatgatccgtttccgaagagaggtcctcgaagatctcgctcgccgcgcccttcttgccgagagcggagacgacgaaatcggccgtataagttccgaccaaggagttcatctcggagatcagcgacttgatgatcgccatgtcgctctcgccttcgagatccgccttttcataaacgtcgaaatagtaataatcggtggcgacgctcggcgtcacattgacggtcgcgctgctgaaggtaatgtccgcaggagtgatcgtaagcctgttattcgagcggacaggcttgggcgaatagatcttgacgcttccgtcttcattctcgaaataatagtcctccttgaaagtcatctccgaaaccgcaacgtttccgatcttcaggggcgaatagaatttaagacccgtttcggtaaagacaaaaggagccttgatgacctcgcccgtggagaccgaaccgtcgtctccgggagccggcgtgtaggagatcctgaaaacgcgggaagagaagttgttgagcctcatctcccagtcaatcggataggtcacgccgtcaaccacgcaacgggtatagatcaggtccatcttggcagccgcatcctgatagctctgcaattcggtcttccagttcacacccgcctcgatcggatagaggtaggcgtaattgttggttttgcgccccttgagcttcacgaaatcagcggaagcctccatgacgatgaagtcggaatcgccctccagtcccccgttgctcgtaccgatgccgagttcagcgcccgtcgtcggcgaggagtagaaatggatgatgtcgttattggtgtcgaacgcgagtacgggaccgctctccgcaaccaccgaatagtaggacgattcggttttgcccgcagcgaaattctcactggaagcgacgaccgtattgtcggtattgaatttcaggaaaagcgtgtagccgccgtaaatgcgctcgccttcgggatacaactccatccgccagccgttttctgcgccctgaagtacagtgatggcttccttgaccgcctcttcaatgcgttccgtcgccgatttcgagaatttatcctcatcgtccttcaggcaggaattgaaaagcaggggcagagccagtaatatcaatatttttttcataaacatccttttttacttaattagtggcatctaaatcgaggttcggaagttctttctggcggcgtaaaacgactttgcgcaattcgtccagatcgattccccaatcgttcttcatgtatttgtccacgatctcgaatttggcttcgagcatcggacggcccacctcgccggccgtttcgagcatctcctcccaagtggcagccgtgttggtgacgtagatggagcttacctccacgaactcctcctcggccgaagtcgaagcgtaacggctgataaaaccgtccttaagcgccaagtcctccgaaggatagacgtcccagcaggcgttgccgacatagcggatgcccgtggccaaaccggtgatctgattgaaatccgtcgagaagggcttcttctggttgaggatatgagcgaattcgtggtggatcgtcttgaaataccactcgttcagcaggtccacattggtcgggtccatattgttgacggcatagagcgtaatcttggttccgccttcggccgtacccagcacgacctcgccgttgttgttataggcgggactgccgaccagaaaaaccatcttcgggaagtagctggtgatgaagtcgcggcttccggtcacctcgtcgtaagcctgcaggcagaggtgcttgaccagcttggccatctgaaccgacttctcgtagttcgcgggagtcagatcgtagatcatgtcgctctccatatcctcataacggtagcggaactcgatgttataaggctcgatatagtttttgtaaagccacgagtccaaaggcgtctccgtcgtctgctccggtttgatgacactcgtgccgctcagatcgtcttcggaacacgagctgcccgaaaaagcgcagacgaatgcgaataatcctaatattgtttttttcataacgttcaacttttatatatagatcagcgaattatcattatctcggattaggagtcatgtcggccgcgagcacatcggcgggcagctgaacggcacggcggttgtcccggacctccagcgtatcgtccacgctcttgattcccaaatcgttgctggtcagggtgcggcggtaaatctcgatgccgaagcgcttcacgtcgaaccagcgcaggccgtagtgcagcgtctcgtaacggcgcagcaacagcagcgtatgaatcatgccttcctgcgtccggtcgatttcgaaagccgggttgagcggcttcttcggagtcggattcttgggatcgtaatccgcaaccgatgcggcccagctcgaaatattggcctcggtcaacgtcttgtatttactgcatgaattcgaaagatagagattcatgtcgttcagggccgccgtgtattccttctgcatgatataggcctcggcgcgggtcagcagggtctcttcggccgtgaagagcggatagacggtatgcctgtagcctgttcccgccaccgggtcgaggtactcgatcagatagggaacacggggcagcaggattttgtcgattccgctgacaaagcgaagcggttcgcacttccacgtgtagggagcgaagggagtattcgtgcagtctatgccctcgttatcggcaatcatctgtccgtgattgtactgcattccgacaccgtatccgccgaatacgcggccggcatacgaataggcggtggccatcatgaaattgcacgtcagatccgcactgacatagtaggtagccgccgtattcagtgtagcgccgttgttcatcggatattccagcagctcctcataattgcggagcgaaccggcaggcgaattggtcagcgccaccgtagcgtattttaccgcctcgtcccatttctggtagtagaggtaaaaacgggccgcaaacgcattggccgcacgcttgttgaaatggtacttgggcaccgaatagatcacgtcgtttatcagcggcagtccctcttcgatatccttctcgatcttggcgtagacctcggcgacggttccgcgctcgtatttgggatcgagttccgtctcggccttctccatatagggaataccgaggtcgtcgggatgcgcaggatcgtaatgctggcagaaaacgttcaccagcacgaagtgggcataggcacggcagataagcgcttcgccttttgcggcgctcagcttgtcggtcatctccatcttgtcgatggccttgagcacctcgttggcgttggcgatagccatgtagtgggcttcccacgtgtgagcggcgtcttcgttgtcggtttcggtcggatcgctccattcatagctctcctgccagaaacggctccagccatcgtaattggcgccgtggttatcggtattgtcggaagccatttcgaggaaaagccacggctggctgtccgcataagccgataccagcatcttgatagccttctcttccgaatcgataatcgtccggttgtcaggctgctcgtcgaggaaatcgttacaggaggaaagtcccgcaacaagaagtcccgcaagcaggaaatatatcaatttgttcgttttcatatgctttaaactaaattataaaccgattttgagcgttaaggtaaactgcttcggcacgggagtggccacaccacccgaattgaagaattccggatcctgaccgttgagcttcttgtccgcatagatcaggaagaggttcgtcgcctgaatcttgagcgcgaggttggacattctcagcttcttgatccagcgcttcgggaagtcgtaggtcagcgaaatttccttcatgcggatgaaatcgcctttggcgattcgggccgtagaatagttgtaggcattgtaggcgtacgacagcttgctgtcattccgcacctgacggctcgacacgatagccggaacatcggtgtatctttcgtcaccgggcgtcatccagcggttgcggaactcgcgcggcatggcgtcgaggtcgttatagatactggagaagaccggatcgagacgaacgacgttgccgaacgaataggtgatgaagacgttcagacgcagacctttgtactggaagatgttgccgaagcttccgacgtccgtcggctccgagggacccgaataaaccagattgtcgaaacgctcggtctcttggaagttgatatcggtcgaagtcagcacgcccgcttcgttgatgaatgtcggaacgccgtcttcgttcagcccccggaaatcgtaggagaaaagcgaattcaccgggtagccctcacgcgagaaaccgataccggaaacgaggttgaaggcacgggtggaagtattgaacttggtcacctcgttcttcatgtgcgaatagatgaaatcggtggtccagctgaaatccttcgtcttgatgttcttcgtcgaaagcgagaactcgataccccgcgacttcatcgtcgcgacgttgccgtacttctggatctggccgccgataccctgcgtcatcacccgaccgatcaggtcgaagttgtcgcgcttgtaccagtcaacggtcaggttgatgcggttgtccagaaagcccaaatccgcaccgatattcagctcgtgcttcttctcgtaggtcagatcgctgttctccagatccttgatcgtcagacccgactcggtaacgccggccgaggggcgccacggcgaatagctctggatgacggcgagcgcattggtcaccgaggggcggtcggccgtcagcgaataggaggccttgagcgacaggtgcgaaacggccttgctgatcgaattgaagaaattttcctcgtggacgttccatgcgcccgaaacgttccacgtaggcagccagcgcgaacgggtcgtcaggcccagcgcgttgttaccttcgtaacgcagcgtgccgttaagcgtatagcggcccttgtaggagtaggtcccattgaagaagaaagcgacgttgcggtagtgggtgttgcccatttcgtaatagggcgagttatcctccttgcccttcttgaagacgagatagtcgtagaacggaatttcacccgaatcgtactgcaggccccagccgcggaaccacgttttctgacgatcgctctggttggtttccataccgaggtaagcattgataatatgcgtattgttgatcgtcgtattataggtcgcggagaaacggaagtcataggacagcagccggttgtccgtacgggtgtagataccgccggcgggcagaatcgatacgggaacggcgtaaatatcatccggatccttgtacagcaacgggttgttgtcgcgaatcgtcgtcgtacccatggcccggtaggcattcgcctgattggaagcctcgcgtacgttatgctcctgcgaagttccggtatagcgcaccgacgccagcgccgaagcctcgaatcccttgaaagccttccacttcagttcgccttggaatttcacatcggcgacgttcaggtcgatatagttgttcgccagttcatggagaatattgaaatccgcatagttacggacataatactccttcggatcgagcacgcgcgaagtattcagggcatacgaataagggttgatgtcgaaatcgcgcttcacctcgcccgttacatagtcggtcgtggcgccgagcgttccgggcgctttctgcttacggtacgaaccgttggtaatcaggttgagcgtaagggcgtccgagatattatacgtcgcattgagattggccgtataacgggaaatctcgctggtcttcgtccatcccggatcgaaaagggcgctgatcgacgcatagtaggcggacttctcggtacccgaagtgatacttaccgaatgcgagtgcatgaccgtattctggaaaagctccttgaaccagtccgtgttgcggtactcggccttgcgcaggtagcggttgcgcgtctccacggtgttttccagcagtccggcattgatcagcgaatacatcttgccgtaaacaccgctcgccgacgcgttggtgacacgcgaattgcccagccagcccttgttgtacagctcctgatagacggacatctggtcctgagagttcatgatgttgaaatcggcgtaggagggaatcatacgatacgtgaactcgcccgtataattgatatggctgacgccggcacgtccctttttggtcgtaatgacgatcacgccggccatagcgcgcgcaccgtagatcgaggtggccgaaccgtccttcaggatattgaaactctcgatatcctcggcgttcagacccgcgatggcggaaccgatcagcgtcgtggcgtcacccgaagagaggtcctcggccgaaatatcggcgacatcctccataatgacgccgtccacaacccaaagcggctttgagctgccgtgaatcgacgtcgcaccgcggacgcggatcttgggagcggtaccgaacgtacccgatacgttctgcaccgaaacaccggccgaacggccttccagaccgcggctgatatcggccagacccgatagtttcacatcgtcggcaaccaactggtcggatgcaccggtgaacagtcgtttatccgttttggtcatacccgtaaccacgaccgtctccacggtctgagaatccggctcgagcgtgaccttcacctcaggcgcaacggctaccgtagcagtcttgtaccccaaataggagatttgcagttcctcggatttcgccggaacattgttcataacgaaaaatccctgctgatcggtggatacaccgatggtcgtacctttgacgataaccgaagcgccgatcacggccgctccgttttcatcaacgacactaccgcgcacttgtttggcttgggcgaatgcccccgctgcaaacacaagtactccaattaacgatagtaggattttttttaccataagcgttaattttaattaattttaaaatagaaagccagcatcctctattcgggtttgcagatatccccaatggtttgatcttcagtgccgttttcgattttcgatgccggaaaaaggcgcgaacgcaggcacctttgcaactatacggtcacctgaaaacgccaaacaactcactaaagatcagctgattggaaataaccgaacaggtaagaacgttaccagagtataacctttccgggatgcttgcgggctgaaaccggagccggaaaccgggtggaaagtgcataaaaaatgtgcggcatctaacgatgccgcacatggcgccagaggggagcgatcccgcctgcgatgttctataaaagccggatcagaaccgtccgggaactcttcatcacggccgctccgtttttgaccccgtcgggaatcgcggcgcgcacataaacgcccgtctccgcgacgcccgtggcgctggtcagcgtcagcgtattgcccgactcgtcgaaagcgatgtcgtaagtgctgccgaacggcttgccgtcgctgtatacgccgccgagcacgtcatttttgacctcgtattttcccgaatacttctggtagcccacctgctcgatccgttggtatatttcgaacgaacggtccgcgccgaaggagacataggcatcgaaatcccgcggagcttcgccgttccacgttttgagctgccattcgcctgcaagctgttttaccagcggcgacaccttctccttgtccgacgatccgcagccggcgaacagacacaagcccagtgcggccagtacgatatagatagtctttctcataatcttcatgcgtttatattacaaccaacctccgttttcggtctgtaccgcgcgggcgatgacggcgaactccttggcgatctccatgccgcccatcgatgtccccgtgccgagaccgctgcctccggcaaccgccctgaccgttattcgggccacgcccggcttggtgcagtgcagcctcagtttcccggacacgaaggtcggctccgccgaaataccgagcttggtcctgtcagcctgcgagatctcgacgccgagataggtcaggttcgccgaagccttgccgaagtacttgtcgagcgaaagctgctgctgtacgccgactttcgctttcaggcagggtgtgccctcgatctgcatcagaagctggtaggcgtcgatcgctcccgtacccatctgcttgcggtagttgcgcagctgcatggtggtcagggattgtttggtgccgtcgaggtaggtgtcgatgtcgttcaccgaagtcagaagcatcgatttgaattcggccaccgtatattgcttccctttggccagcgcgtaggaaagccccagcgcggcgacgcccgatacgtgcgggcaggccatcgaggtgccctgcatatagccgtaatccgactggtaaagctcggacggaagcgtcgaaagcacctgcgcggcgctgcttcccgaaggcgagatataggcgtcgccgcccggagccgcgacgttgcagcccggaccgtagttcgtgtagtaggccggcagatagtcgggcgaaaaggcggtgaccgaaatgtaatcgcggtaagcgcccggataaccggacatggccttggcgtcgttgcccgcagcgaaaatcacaagtccgccgtcgagaacggcgttgtttttcgtcgcgatgaagtagtcgatcgcctgcttttcgattcgcgccccgctggcgtaggcgttgtcggtcgtgaccgctccggccggatacccccacgaacactggagaatcgacgccccgttgtcggcagcgtatttgatcgcttcggcggaaacggcggccgaaccgccctcgccgcccgaaaatatctggcacgacatgagtttcacgccgtcgttcctgcccgtgcctcccgcgatgcccgacacgccgacaccgttgttgctgacggcggctaccgtacctgcgacgtgggtgccgtggcccgaatcgccgatgttcttgcctttgtcgtcataagcttcgacgtcccatgtcagccggctcgtgcccagcgcgaagttgtagccgtaaacgtcgtcggcatagccgttgccgtcgtcgtcgcggcccgtcgcaccgctctgctcggcctcgttgatccacatgttggccgccagatcgggatgcgagtacttgatgccctgatcgacgatcgccacggtcagcgacggatcgcccgcggcgagtttccacgcctcctccacgttgatatccgctccggcgcgcgtcgtttcggcaaatattctgtcgccgttgttgctgtagtgccactggtccttgtagccgggatcgttgaaacctccggcggcggcgcgcgtcgccgccgaaccgcccctgtagggacaggccctgttgtccgaagccagctgcagtttggtgttgaactgcacgaagctcacctccgaaacggcggcgagccgccgtgccgctgcgtccagatcgacttcctcgccgaacgttacgatataccatttatgcagtcccgccgcgcgggtgcgctcttcggcgaccggattgcagggaaatacgcggcgcagcgaagtgacgcccagttgtgtgaagatgtcgtccacgggcgctatcccggagcgcgtcgccgccgtacgcgtaatcgccgccgctgcggcggtctgttcgacgtccccgacggcatcgccgtcgaaatagatcagcagttcgccccgcgcggcattcgcgggagcattgacgatcttgcgcatggcggccgccggagcctccttgccgccgctctcttccatcgggtccgaggcacagcccgcaaggaacagcagcgcaagcagtaaaattttcttgtcagtcatggtaggtgaatttaaaaagggaaccggcctcgcgggccggctccccggtgatagtcgtactgtccgaacgacagttttttattcggttattttcgcgccggtcctgcgggtgaagtccgcactccgggcggcgattccctgacggaattccaccttggccttggcggcgcccaaagcgggcatgccgacgatttcgcactcacggccgcggtcggcaggcattctgttttcgccgacaattactttcgcaagctccggcccgcggagttccacgtaattgccgggctgcacggagagcgcctttaccacggaagccatatcggcggccggatacaaatccgggtctgcgagcagcagccattcatggaagacgatgcctccttcgccgccggagaatttgttcgtcgcaggatcgtagcccgcatagattccgaaccacatgcccgtgaacgtcagattgttcgacgcctgaagctggggattgggcacgaaagccaccagtccgtcggccaccggcgcgcccagaagcaggccgcgtccgctgtaaactccgtcgtcaccctcggccgtgtaagccacgttcacgaagtaatccgttccctgaagcgtcacgttgccgatcagctgcggagcgagtacgtagagaaggccgccgctccacgccatatactgcgattcgccggcattgaacgcctgaggagcgcccgtaagtccggacaccttcacgtagtcactgaatacgttgtcgaaatccgcatatccggaagtcgttcctccgtcttcgacgactacctgtccgaagtactgacgggaggtgttgccggtcttgtcataggcatcgaccgcatagtaatcccacgttccgcagtagcccgccttggtcaggccgttttcgacatcgtcgtacgtatagtgtatctgcagcggatccggtttgcctgccgtagtctgttgcacgctgtacagtttgccgtaatagccgttgtaagcccacaccagcagcacgtaatccgtaccggcgttcaagcctttatgaagcagcgagagacccgtgtcgttgatcttgtcaatttcttcagccgtaattgccttgccggacgttttggctatttcaatcaggtcctcgctgcttttaccggtcaggtcggcactcttgaagagtcccatgtagcccgattcgatattttcaccgaacagaatggagcggatagagttttcgggagtgtgtccctgcgcttcgaactcccacgtaagctccgtacggacgctcagcacgacgggtttgtcgtcgccggccttgacgtagccgaatgacaggaattcgtagccctgaagctcgcccgcctcatcgtaaatgttggcaacgacggtgtatttgccggtctcttcgaattgggccacgatggttccgtccgccgtgatctccttcgactcgaccgttcccgcgtcgatgcccgccgaattcgccttggcgatggcgtcgccgaagactccttcgaagaaggcgtatttcaccttggcgacgtcggcgcccagtttggctgcgatctcgaccttgccgtcggccggttcgctgtcggtcagggcgagcgagaagtcgtactcctcggctcccggcagcatcagacgctgcatgccgccggcgttgccgacataccagccgtcgtcgccgaacatcagcagtacgcttttggccgggaatgtaatgactccgttcacgttggtgccgtacccgctgccgttgaatccgttttccggcacctgcgaggcaaagctgacgataccgtcgccgctgttgaggaacacgcccgtagactgttcgggcagccagaccttatccggattcgtcgcgtcgatataggtaatgacatccgaacggttgcccgacacttcggacggagacatgttcagcagcgaagccagatactccgccgagtagacgttgctgatgcggtagtagccggggttgtcgtcgcgttcgtagatctccacctcgccttcgccgtaacggttgggaattccgtaggcggagctgagaatgtcgtcgcgccatttgcccttggtctcgcctttcggcccggtcacgaggttccatttcacgcgggtgacggagaagcttacgcccgaagccttttcaccgtagatgaaggcgtatttcttgtcttcgatctggatgttgcaggaataggtcgtaccgatttcggcgtcggggaaagagacctgaaaggtcgtttccgtcgccccgtcgtcgaacgagatttccgaagcggagaagatcgcgtcctcactgcccgtaacggttacgggaaccgtgatggcatcggcgtcgttggtacgcatggccgtgaaggtcagtaccgtcggatcggccggatcgagttcgaggtccgcggcgttgtcctgcgaggggaagtaaaccccatagcagccgtcggcctcggattcgccgcgggtgtaggtcggatcgtcggaacaccctgcgaacacgaaagtcgcaataagcgcgtataagaaatatttgattgctttcatatgtttttcggttttaaatcatccatgaaaacttacgttactgcacccacggatcgatgattcccacgggattggggttgttctgcgattcgagcgcggtgttctgctgggtctccgtttcggggatacagaagttccaccacggtgcgcggccgtcggtcgagaagcggcagtccgaaggtacgttcgtgccgacgtagccggttttcaggctgtaattcagacgcttgaagtcgtagaatacgacgccttcgccccatagttcgatacgcttgttccagataatctcctccacgacgtcggcagacgacacggccgaggtgctgaattccgggtcgcgcttggccatgaaggttttgagcagctggagacctgcggaggcgtcggcgtgcgccgtagcctcggcttcgatcaggtacatctcctcgacgcgcatcatcggaatatcggtaacgttgccgacggaataggtcgccgtctcgccttcggcgggatggaacttcaggttcgcataggccgggaggttggcgaactgcgccgccgtcaggttggtaatgtcgctgtaatcggcatatttggcatcgggtcccacgaacgcgcgcttgcgccagtcggtgtcggatatttcgttgtagaaattgctggtaacgccttcgaaaacgtatttgccgccatacccccacgtagcctcgctcgaacgccatgccgcgaaattcacaaggttggcgatgccttcggtagactgcggaaggtaccacatccacgaattgttggctttgttgaagcccgttttggggttcagccactccgcttcggtcatgatcgtgcatttcgaggcgtcgatggccttgcgggcatacgtcgcggcgtcggcatacttcgacgaatcgaagccgcccagccagaggtaagcacgcgccttgatgccgtagaccacggccagactcggattggtcttcgacgaagaggtgtagttggccagcagcgcctcggcgtcgtcgaggtccctgaggatgaattcgaacatcgcctcgcgcgtcacgcgcggattgttgcgggccatatcctcggtggtgttctcatccacgatcgggacggtcagccccttgacgcccgaaacgtcggtgtacttgttgttgagcggatcgtacagtcgggccagatccagatagagctgggcgcgataagctttggcgaagcccagatagcttttctgcgcttcggaaagttccacgcccgccagcaggccgaccacatcgttgctcgatttgatgaacgtatagtagcagttccacgggaagcgacatacggtctgcgtcggaccgatcagaatgcccgactgccagtaggtgaaccagtcatatcccgaaccttcgtcgccggaggagcatatcacgtcgcccgtggcggcgtccgtagcgcacatcatgcccggatagccgaagtcgaagccgtagttgttcgtcctgccgtacaccgaataggggtaggtcatgttgacggggatggcattgacgatggcctccaccgcagtcggcgaatcgctgacctgtccggaagtcgcgctgtcggtggggaaggtctctttgatacagcccgtgagcgccatggagcagacaagggcgagtgtcgttgttttcaatatgtttttcatttcaatccctgttttatccgttagattagaactgtacggttacaccgcccgaaatagtgcggatcggcgagtagttggagaagttggtcgctcccgtgaacgaataacgcgggtcgagtccctgacgcttcgaccagtagaccacgttgtcgcaggccagatagacgcgcagtttctgtacgccgaatttctgggtgatcttcgacggcagcgtatagccgacgttgatgttcgagatgttcaggtagctcgcgtcggtcaggaaacggtcggagacgctcgtcgtatactggtcgccgtattgcagacggggaatgtccgagcctttgttttcgggcgtccacgccttgaggatgtccttgtggtagttggtgccgacggtggttccgtagggcgacgacatgaagctggcgtaacccgaatcgtagaccttgccgccgatctggtagttgaacgagatcgagaaatcgacgccgtaggccgaaaccgaggtcgagaagccgccgtataccgaaggaatcgcgctgtcgtgcaggtagcgggtcgcggaggtgtagtccgaagtcttggtccgggtgatcttgccgtcgtcgcccttcacgtccttgtaccagagcgaagcgcccgtttcgggatcgacgccggcgtacgaacgcaggtaataggtgtagagcggcagcccttcgccgacgaaataactgccgtcgatatagcctttgtagccctccacggtcgtggatttgtgttcgggagccagataggtgacctcattcttcacatgggtcaggttcaggttgaagctccacaatacgtttttcgtgcggatcaggtcggcgttcagctccacctcgacgccgcggttgaccatgtcgcccacgttggcgtaataggacgagtaacccagcgacgaaggaaccgagaatgcgaagagcatgtccgaagtcttgcggttgaagaaatcgacgcttccgctcaggcggttgttccagaaaccgaactccgtaccgatgttcaggttggtgttggtctcccacgtaatgttgggattgcctttctgcccgaagagcacggcgatttcgccgttgttgttctcgatcgaataggtgtcggtgtagaggtagtagccgatgttgtcgttgccctgcgaaccgtaagatgacttgagtttcagcatgttcacccaaggagcgtcgaaccagttctcctgattgaggagccacgcggcgcctaccgaccagaagttgccccagcggtggtcgggatggaagcgcgacgatgcgtcgcggcggtacgaaccgctcacgaagtagcggcccgcatagtcgtactgggcgcgcatgaagtaaccctccgagttgtagtcgtcgatgtaggagtgggcgcccgcgccgtcaacgacggctccgccaagctcctcgttgtcataggagaagagtttcgacttggtgccgctcaggtagtaatattttttctgatagtactcgtgaccgaccatcagccccacgttgtgcttgccgaaggtctcgttgtagttcagaatctgctgaaggttgtaggcgatgtcgcgggtgtggtacttcgaaatagtaccgcccgcctcggcgaactgaccgtaatactggttgttgagataagtcgtgcgggtttcgtcgatgttggtgctgccgtttaccgtcagcttcagccccttgtaaagcgagatgtccacgaagccgctgcccgaaaaggcgttgccctcggcctttttcttgttgagccagctggtctgcagtccgttggcgccgggcagcagcggacgggtcagacccgcattgcccttgtcgccgtagtcgtacatctgatagccgttgtcgtccaccatgatgcggcccgaaccgtcgcggatgtataccgggtagatcgggggcatctgtgcagagaacgcgaagatgttggccgtcgaggaagccgatccttcgttcgagttgccgttgctgttgctgaagtgcgcatacgacatgttgccgcccaccttcagccacttcttggcctgataatcggccttcagacgcgcggtatagcgctccagcgccgaacttttgataatacccgtattgtccagataaccgagcgaagcgtagaacgagctgcgctccgtcgcaccggagatgttcacgttgtattcctgacggaacgccgactggtaagcctcgtcgatccagtcgtcgggcgtcagccaatactcctgtccgttgtagatgatcttgcggcccagcgtcgcgttcggattcagcttgccgttggtgccgatcagcgcctgcccttcgggaaccgtatagacgttgtatcccagaccgcccgtgccgttggaagtcaggccgctgctggccagcgcataggccttcgccgccggattggtctgcgcataatagccgtagagcgccttgaaatgcgtctcgtaatactgcgcgggcgaggtgatcacgtcgtactcctccagcgctttcgagttgacgccccacttggcgtcgatcgtcacgacggcgtcgcccgacttcgcctttttggtggtgaccataatcacgccgttggcgccgcgggcgccgtacagagcgttcgaagcggcgtccttgaggacggtcatcgactcgatgtcgttcgtgttcaggttgttcaggtcgccttcatagggcatgccgtccacaatccagagcggctccttgccggcgttgatcgaaccgaaaccgcggacgcggatcgagggggtcttgccgagatctcccgacgtgctggaggtctgcacaccggccacgcggccgaccagagccgtcgccacgttggaggtctgcaccttggcaatctcatccgattttatgacggcagccgaaccggtgaaagcctctttctttgccgtaccgaaggccacgacgatcacatcgtcgatcgcttgcgcatcctccttcatcgtgacgttgatccgggtttttccggcgataggcagctgctgcggctcaaaaccgacaaacgtcaccacgagcgtgccgttcaccggagccgaaagcgtatactcgccggccgtgttggtcgtggtccccagagaggtcccatctacaatgacggtcgcgcctgcaaccggatgtccgtttgcatcggaaactgtaccggagatctgcctattctgggccgtggcatatgccaagaacacgaatacggcaattaacgatagtacaatttttcttaccataagcgttaattttaattaattttaaaataaaaagtcaactgcccgcgttagtataatgtaaattgttcataatcaatacgcgaggcccgtctccggccaaatctgccaattgcagtctaattaattgataaccaaacgtctgtctcacaacaggacgttgtatcggttgcacatctgttactacagcgtaacccttccgaatacgacaacaaggggaaaataagctatttagactcaatcctgcgtcatatggttgttacttaatcattacctttaaagcggtttgtgtattgtataggttaatgaaaaaggttgttaaaaacaatgagaaacacgttcaaggttctattctacatcaagaagaatgcgcctctgcggaacggttgggccccgatcatgggacgcatcacgatcaacggacagcggacgcaattttccacacggctctcggtcactcccgccagttgggacaccgcacaggggcgggtctgcggacggagcaacatggccgtccaaatcaacgaaaagctggccaatatccgatttcacatcgagagatgctacaacaagctcttttacgagcaggccttcgttactccggtgatggtcaaagagatgtatttcggcggcaatcacaagcaggagaccgtggtcgccttcttcaagcagcacaacgacgaattcaaacgcatggtcggcgtcagccgcagcatgaccacatattataaatataggtgtgtatgccggcatctggcggatttcgtctgggacaagtacaaccggaaggatttaatgttcaaggaactcaaccgcgaattccttacgggctttcattcctacatagcgcaggagtgcgcccataagaaaaataccacgtggatctacatgatcgccctcaaacacatcctgatgctggcccgcagcaaaggctatatgaacaaggatctgtttgcaaattacaaattacaaagcgaattcgtaacgcgcaattacctctccatgagcgagatcaacaaactgatgcagtacgagggcgacactcccaccttacaacttatccgggatgcctttctgttcagctgtttcaccggcttgtcttatatcgacatgaaggaccttacgctggaaaatatccagcaggtgaataaacagttgtggatcagtacgacgcgccgcaaaacgggttccgaagtaaacgtccggctgttcgaagtgccttacaacattctgctcaagcacaggccgatgacccggaccaagcgaatcttcgaccttccgagcaacggctggtgcaatgcctgtctcgacaaaatcatgtccgaaataggcattatgaaacagattacattccattcggcccgccataccttcgccacgacgatcaccctgtcgcagggcgtagctatcgagacgatcagcaagctgctgggacatagaaacatacgaactacgcagatttatgccaccattacgcactcgcagctcgacggcgaaatggaacgtctgtcgaagcgaatcaactccctttaccgcaatttgcttcctccggatgcacccgaagccggcacaaagctcatctaagcgccgtcatccgccccttgcgccccttcccggagggaaaatcaccggaaatcaccgaaaagaccgaaaaccggcggttacaatctgtaaccagcccgacactttgccgggaaaactgtaagtggcggacgttaatccgcagaatatgtgtaatagtagtaaattattttaaaaatttatttgtatatgaatcgccaaacgtttatctttgctagtgaactttttattttaaaaaattaactaatagattaacgcttatggtaaaaaaaatcctactatcgttaattggagtacttgtgtttgcagcgggggcattcgcccaagccaaacaagtgcgcggtagtgtcgttgatgaaaacggagcggccgtgatcggcgcttcggttatcgtcaaaggtacgaccatcggtgtatccaccgatcagcagggatttttcgttatgaacaatgttccggcgaaatccgaggaactgcaaatctcctatttggggtatgttacgcaggatgtgaagatccgtccgaacatgcagattacccttgttcctgacgagcagactatcgagtccgtcgtggttacgggtatgaccaagaccgacaaacgactctttacgggtgcggcggaccgcctttctgccgacgatgtgaaactttcgggtatggccgatatcagccgcggtctggaaggccgttcggccggtgtctcggtgcagaacgtatcgggtacgttcggtaccgctcccaagatccgcgtccgcggtgcgacgtcgatcttcggcagctcgaagcccctctgggttgtggacggcgtcattatggaggatgtgatcgacatcgacgccgacgcactctcttcgggtgacgccacgacgctgatcagctccgccatcgcaggtctcaacgccgacgacatcgagagcttcagcattctgaaagacggttccgcaacttccatatacggtgcgcgcgctatggccggcgtgatcgtcgttacgaccaagaaaggccgcgcaggcgaaagccgcatcagctataccggcgactatacgttccgcatgacgccgcgctatgccgatttcaacatcatgaattctcaggatcagatgtcggtatatcaggaaatggccgctaagggctggctcaacaactcgactatcgcaaacgcctcttcgagcggtgtttacggcaaaatgtgggagctggtaaatacgggcaaactcgaaaatacggaggctgcgcgcaaccgctacctgcgtaaggccgagtaccgcaacacggactggttcaaggaacttttccggagttcgctgatgcacacgcactcgatcagcctcagctccggtaccgagaagtcgcagtactacgcttcgatgagcgccatgttcgatccgggatggaccaaggccagcgaggtggagcgttatacggcgaacctcaacgctacctacaatattttcgacaatctgacgctgaacctcatttcgagcggctcttaccgtaagcaaacggctccgggtacgttggccgcgacgaccgacgtggtattcggcgaggtaaagcgcgatttcgacatcaacccctactcgtatgcgatgaattcgtcccggacgctcgatcccgatgaattctacacgcgcaactacgctccgttcaacattctcgacgaacttgggaagaactacatcgatctcaacgtcgtggatacgaagttccaagcagaactgcgttacaaacccgtcacgggtctcgaactgagcgcactggccgccatcaaatattcggctacgacgcaggagcacaacattacggactattcgaatcaggcccgcgcctaccgtgcaatggctactacggtgatccgtgacaacaacccgttcctgtataccgatcccgacaatgcgtatgcagtgcctatttcgatcctgcccaagggcggtatctacaagcgccgcgacaacaacatgctgtcgtacgacttccgttttgccgcttcgtacaatacggagatcaacaaccagcacattatcaacctctacggaggtatggaggtcaaccagagcgaccgtcacgaatcttggttcaacggctggggtatgcagtactcgatgggcctgatccccttctacgcctacgaggtattcaagaaaggcaaggaggagaacaccgactacttcggtctggccgacacccattaccgcaacgtcgctttcttcttcaacggcacctattcgtggaacggccgctacaccctcaacggaaccttccgttacgaaggaacgaaccgcatgggtaagagccgcagcgcccgctggctgccgacatggaacgtcgccggtgcatggaacgtacacgaagagaatttcttcgaggcgctgcgtcccgcactgtcgcacttgtcgctgaaggcttcctactcgctgaccgcagaccgcggccccagcttcgtgaccaactcgcgcgtcgtcattacgagcaataccccgtggcgtccttcggccggtgttaccgagtcgggtctgacgatttacgacttggagaacagcgagctgacttacgagaagaagaacgaggtgaacgtcggtatcgacatgggcttcctgaacaaccgcatcagcctcgcagccgactggtacaagcgtgacaaccacgacctgatcggtgtgatcaacacgcagggtatcggcggtcaggtgatgaaatacggtaacgtcgccggtctgaaatcttcgggtgtcgagctgactctttcgacccgcaacatcgaaaccaagaatttcagctggtctacggacttcatctattcgcacctgaaagaggaggtgaccgacctgatgtcgtacaagcgtgccatcgacctcgtatcgggcaccggtttcggtatggaaggctatccttcgcgttcgatcttctcgttcgacttccaaggcctgaacgacgagggtatcccgcagttcatcaacgagaaaggccagctcacgaccacctcgatcaacttccaagagcgtaacaacctcggacatctgaagtattcgggtacggccgatccgacggatttcggtagcttcggcaacatgttccgtctctacggcttcaagctcaatgtcttcatcacctactcgttcggcaatgtgatccgtctggatccggtcttctccgaatcctacagcgacctgctctccatgccgcgcgagttccgcaaccgctggatgcgtccgggcgatgagaaccatacggatattccggttatcgccaacaagcgtcaggtcaagaaggacaactacctttcgcgcgcttacaatgcctacaactattcgacggcacgtatcgccaagggcgacttcatccgcatgaaggagatttcgctgacctacgacttcccgaagcgctggatcaagaaactccgtttctcaaacatgtcgcttaaacttcaggctacgaacctcttcctgatctatgccgacaagaagctcaacggtcaggatcccgaattcttcaataccggcggtgttgcggttccggtgcccaagcaatttacgctgacgctgaaaatcggtttataacagacgctaaagttgaaaaatatgaatacgaaaaaaataaccacgctaatcgtactcgcggctgccctcgtggcgcttcccgcttgtaacgactttttggatgagatgccggacaaccgaaccgaactcgattcgagcgacaagatcaccagtctgctggtttcggcatattccgaacatacctaccccgtaacctgcgaatacgcatcggacaatgtcgatgaaacggcattggtttcaccgaacttcgaacccgaacaggaagagtactaccgctggcaggacgttacggcggccgttaccaacgaagcgcctcaggccgtatggagtcagtattacatggcgattgccgctgccaaccaagcgctcgacgccatcaaggagctgggcggcgccgacaccccgcagctgaaggccgccaagggcgaagcgctcatttgccgtgcatacgctcatttctgtctggccaatatgttctgtcaggcttacaatccgcagtatgcgtcggaagaccttggcatcccctacatggagaaggccgaaacgatactcaaccccaaatacacccgcggtacgctggccgatgtctattccaagatcgacgccgacctgatcgagggtctgccgctgatcaccgacgagttctactcggtgccgaagtaccatttcaaccagaaggccgcctatgcttttgcagcccgtttctacctcttctatcagaagtgggacgagtgtatcgccgccgcgaaggtagtgctgggaagcgctcccgaaacgatgatgcgcgacctcgaagcgaacggcaagctgggactgcagtcggccgacggacagaccctgcttcgcacgatggactatatcgactactcgcacaagtgcaatctgctgctgcagacctcgataaccgatgctcccggcatttcgttcggtccttacaatgcctacaccgggttctcccacggtaactggctggatcagaccgaaaccttccgcgctccgacggctccatggggcagcagctatacgctctactctgcgccgtattcaatgaataccggtaaagccgacaagtgtttcgcatggcgtgcgccctacctcttcgagatcaaggacccggtgatgcagacgggactcgcgcatacggttttccccgcatttacggccgaagagacgctgctctgccgcgccgaggcttacatcatgaagaaagaatacggcccggctctgaacgacatgaacctctggatcagcaaatatgtgaaatccggcgcccagacgctcaccgaagccaacgtcaaccagtgggcgcagaacacgaaggagtataccccggccaatcccacggtgaagaaacctttcggcgagacggctttcccgctcgaagccggcacgcagaccaacatgtgctatgcgctgctgcatctgcgccgtgtggagaccgtacacctcggtttgcgctggttcgacataaaacgttacggcattacgatctatcgtcgcaagctggccagctacaacacgctcggaagcgttaccgacgaactgcacgcccgcgacccgcgctgcgcgatgcagctgccgatggatgtcgttgccgcaggcctgactcctaacccgagataatcagatgctaacgataaaacaggatatacgatgaaaaagaatattatattacttatgacggcagtgttcggagtgttcgttttggcgggctgctccgaggacgacctgaaaaagacgagtgctgtcctcgactcgcctaccgtcgagaacgatttcgacagatggcttaccaagaactatttggaaccctacaacatcgatttcaaatatcgtttcaaagatgttctgggcgacatggactacaacctgactcccgcagattacggacaggcgatcaaactggccaagctgacgctgcacctgacgctgcaggtttacgacgaagtgacgggcaacaggcagttcatcagcgagaacttcccgaagatcgtccatgttatcggttcgccggcctataacgaaaacaacaatatcgtactcggtgtggccgaaggcggtaagatgatgaccctttatcaggtaaacatcatcgactatctgctggagacgaagaatatcgaccagctcaacgagctcttcttcaagaccatgcaccatgagttcggtcacatcctccaccagacgcggccctactcgaccgacttcaacgccgtgacgccttcgagctacgtcggcgacgcatgcttcgacacctatcggacggatgcagcggctcgtcaggccgggtttatcacgcgttattcgtcgaaggctcccgatgaggatttcgtggaacagctctcgctctacgtaacctcgacggctgccgaatgggaagccattctcgcacaaggcggcagcgccggacgtccgcttctcgaacagaagaacgatatcatgcgtgcctacatgctcagcacatgggatatcaatatcgatgaactgcgaaaagtggtattacgtcggcagaatgagatttggtcgctcgattataacatttaattcgtaaaagagatgaaaaaacttatcatattattagcggttttgccgcttgtcctctcttcgtgcctcaaagacgacaaggacgctttcggcaaaacggccagtgagcgaatccgcgaggtgcaggagggcaccgaaaaggcgctgaccggagctgccaacggctggctgatggagtactatcccagtgcgacgcaggagtacggaggcattgcgatctacatgaagttccagaacggaacggttaccgtaacttccgaagcgggaggcgccggcaagaccgccgagagtctctactcgtacgatcaggattacggtcccacgatcaatttcgacacttacaatccctacttccatatctattcggagccgaactccggtgtcggcccgaccaatacgggtatgggaggtgacagcgagttcatcatcatgagctacgcggccgacaaagtcgttctgcgcggcaagaagacccagaacaccatcgtgctgactcccctgccggaaaccgcatggaacacgatgttcggcaaatattccgcggatgtgaacaagatggacaatttccggtcctacgaactcgttctcaacggcaagacctacgacatttcgcgcgaggtggcggccggttataactcccgttatttttcggttgtgactgaaaacggaacgattcccgcaagcttcatctacacgcaggataccggactcaagttctatgagccgctggttgtcgacggagtgtcgatcgaggagatgacttggagcggcggcatgttcaccgacgaggtaagcggcgcccggattcaggaaacggtatccaacaataagtttaccttcgccgtatcgggaatcaaggcaacttcggtcgacgtagaaacgacgccgactgttgcaaacgagtactactatttcgacgtcgtgccgtcgagtgcattcgcaagtgcatcggatgaggagattctgtacgaactgatggacggaatcacgtcgatgaaccaattgtcgctcggcaaaatgatgaaaacgctgacggtagattccgacacggagtacataccctgcgcattcggtcttaaaatcgtaaacggctggatctatccgatcacggaactggcaaagggcaccgctttcgtgagcggtcagggcgatccgatgtcgccggaataccaagcatggctcggtacatggaccgtcaccagtacgtcgtccgaaaagagcaagcagccgattacattcgacatcacgcttgccaagaaggtcgccaacacctcttattcgctgaccggctgggatatttcggtccgccgactgacttgggcgggaactgccgacttcaaagcaaccaacaattcgttcgagatcataaacgggcaagaactcccgtattcggatcccaacggtacgccgtatcttatcgcccgcggaatcgcagcatcgggcacctatatcgtctctggcagctacccggctctgaccggcgttatgaattccgacggaacagcttccgtttcctgctataagggcaagttctcggacggcgaagagtttaccgtaggtacggtaggatatttcatagataccggaggcagctacggatcttatggtcccgcagcaggatttacatcgggagatcatccggtcggaccgttcaagatggttaagaaatcggctgccggcgcccccgccaaagccgctgctctgacgaacgtcaatactgtaatccggtaccacaaattatcggatattccgcagatgaatttatcgtcgtttcagatcggcatcaatgtaaaagctgcaaagctcgaataagagcccttgcattattgatcaataggggtgggaggagtcattatcgaatgactcctcccaaattttagagggattaccatcgtttcatctgcatgagttcggtattgcaccggactcatgtttgtcaatggactcttaggcgcgcaggcaggcgcagccgactgccggagaggtcttcaagcggaatgcaggctgggacggttcgtctccataaaataataaataggataataatttgcataaatccgcacaaaatcgcatatttgtatcttaatcttccgttacgaaccatttatggaatcttttttgaaccatacgccggcggcatatacacactgcaaatccgctccggaagatctgccgctcctatcctttgtcaactattcaaaatcatagttatgaacaacagaaaattactcatttttgcgtcattcctgctgttggcgggctgtacgaccgatccggatatggataataacgtggggggggtacttccgcgcagactccgtcggccaagatcgtcaacacctccgccgatgcggcggccgaaacgcttctggtctatttcaacgaccgtgcggtcgaaagcatcgaaagcaccgctgccgcaacccgcactgcggcgacccgttcgggagtcgcctccgtagacgacgttctgagccgtctggagatcgtttcgttggaacgtcttttcacttacgacgcccggagcgaagaacagacccgcgccgcagggctgcataaatggtacatactcaccttcggccaaggcgcggatctggaaaaagccgcaagggagctggccggagtggccgaagtgagccgcatacaattcgacacgaaactgcaaaaggcatcggtcggcaatcccatgccgttcagaatcgacgagacggggacgacccgcgccgatttctccggcagcggcttcaatgatcccggacttccgaaccaatggcactacagcaacaacggcgacaaaatgttcgcggctacgacggccgcaggcgccgacatcaatgttccggaggcatggaaactgaccggcggcagcccttcgatcatcgtcgccatcgtcgatgaaggcgtgaaatacacccatcccgatctggccgacaacatgtgggtaaataaggccgaactgaacggtgcggcaaacaccgacaatgatgggaacggctataagaacgacgtacatggctacaacttcgctacaaactcctccgatctgacatggagtgtatcgcattatgacaataaaggcaaatacgacggcgattcgggccacggcacccacgtcgcaggtacggtagccgccgtaaacaacaacggcaaaggcgtctgcggcgtagcgggcggcacgggcagcaacgacggcgtgaaactcatgtcgtgccagattttttcgggcggaaacggcggcaccatctcgacttcggtccgcgcgatcaaatacgccgccgacaacggcgcctcgatcatccagtgttcgtggggctaccccactcagtcgccgttcacgtcggacagctattatgaaaggaattacgctgcggaaaaagaggcgatcgactacttcgtttcgaaaaagaacaacgacgtactcgacggaggccttgcgatcttcgccgcaggcaacgacgccaccaacttcgcaagttatccgggcggctaccgcagctacgtttcggtcacctcgttcggcccggactacctgccggcctactacacgaattacggtcccggctgcaacgtcgcggctccgggcggcgacgccagcatctcgcccgcaggaaccagcgccgcgcaggtgctttcgacactgccttccgagctgcccgcagaactcggcaccgacggagccgactacggctacatgcagggcacctcgatggcctgcccccacgtatcgggcgtcgctgcgctgggactctcctacgcgctggccaaaggcaggcattacacggtggacgagttcaaatcgatgctcctgaccgccgtaaacgacatcgactcctatatcatcggcggcaccaaaaacggcatggtactccgcaactaccgcaagaatatgggcaccggatcgatcgatgcctaccagctgctgatgcagatcgaaggcacgccctgcctgccggctaaagtcggcgtacagcaggtgctctcgctcgacaagttcttcgggcaggcttcggcgaacctgacctacaagagcgccgaaatgtcgcaggccgacatggacaagctggggatcaccgccgcgcctgcgttctcgtacggaaaactgcagatcaaatgcaccaaaccgggcgtcgccaagatcaagatcaaggccatggccggaagttcctcggcaaacggagagatgagcggcatggagatcaccaaggagttcgcgatcatcgcccgcgcggtacaagccggcaacgggggttggttataatataaacgtatgaaaactatgagaaagactatctatatcgtactggccgcattgggcctgtgtctgttcgccggctgcggatcgtcggacaaggagaaggtgtcgcccacggcaaaacagctcgtcggcgagtggcagctcaagacatggacgggcgagactccgcaggatttcgatatttacctctcgttcggagcggacaatactttcgagatataccaaaggctcgccgaggtaaaataccagaaattcaccggcagttatcaggtgcagaacgacgtgctcagcggaaaatacagcggcggcaagaacttcggaagcacctacgacatttcattcaacgaatcgggcagcacgctgacgctgaccagcgccacgaacgttacggaagtgagcgtatacgagcgcagcacgattccgaattcggtcaaggagggcgccgccgtgatgaaatccacccgttcggcggtacggctggcgctgtaggccgtccgccgcaaaggtcaaaacagagaatctccggtcttatgaccggagattttttcatgccggagtcattcacaccccaccggcggccgatttccggacgcaaacgccgttcatgtccgaaaaactgttatatttgccctctggaagagaaattatatttacagaaacatcagacggacagccggatagctctcgatttccgttttggcacatttttcactatctttggacaaaatacgttacatattatgaacatcaccgaaattctgcccggcattcattacgtcggggtcaatgatcgcacgacaacccgtttcgaaggcctctggtcgcttccccacggagtttcatacaacgcatatctggtcgcagacgagaaggtcgccctgatcgacaccgtcgaagaggctttcggaagccgtttgttcgaaaatatccgcgagacgatcggcgaccgcccgatcgactacctcgtggtcaatcacatggagccggaccactcgtcgtccatccgcgccctgcgcctgctctaccccgacatccggatcgtcggcaatgccaagacgctgcaaatgatccaaggcttctacggcatcgacaccgggacgctcgaagtcaaggagggcgacacgatttcgctcggcgcgaagacgctctcgttctacatggcgccgatggtacactggcccgaaacgatggtcacgtggtgcgccgaagccgggacgctcttctctggcgacgctttcggcacgttcggggctatcgacggcggcatcaccgattcgcagctcgacccgtcgcgctactgggacgagatgcgccgctactacgcctgcatcgtgggcaaatacggcggccccgtgcagaaagcgctggcaaaggtccgcggactgaaccccacgaccatctgttcgacccacggtcccgtatggcagcggcagattccgcaggtaatggatatttacgaccgtctgagccgctacgagggagaacccggcgtagtgctcgcctacggttcgatgtacggcaacacggagcagatggccgaacgcatcgcccgcgagcttgcgagccggggcgtcggcccgatcgtcatgtacaacctttcgttcgccgacgaatcggtcgtgctgcgcgacgtgttccgctacgacacgctgatcgtcggcgcgccgacctacaacggaggcatctacccgcccgcggcgcgcctgctcgacctgatcgccgctcgctgcgtcccgcagcgcaacttcgggtggttcggatcgttctgctgggccggggccgccgtgcgcggcatgggcgaattcgcgcagcgcatgaagtgggagccgatctgcgatcccgtggagatgaagcagggcttctcgtccggctgccacgacttctgcagccggttcgccgacggcgtcgccgagcgcttccgccgctgaacatacacacaccaaaaactcacaatatgaaaatcgcagtcgtaggaacggggtacgtcggtctggtttcgggggcttgtttcgccgaaatgggcctcgacatcacgtgcgtcgatatagacaaaaagaagatcgacgggctgaacaacggcgtcatcccgatctatgaaccggggctggaagaggtcgtccggcgcaatgtcgaagagggccgtctgcacttcacgaccgaactcacggattgtcttgacaacgtggaggtggtcttctcggccgtaggcacgccgcccgacgaggacggctcggccgacctgaaatacgtgctgaaagtggcccgcacgttcgggcggaatatcaagaaatatacggtgctggtgaccaaaagcaccgttccggtaggtactgcgcagaaagtcaaggccgtaatccgcgaagagcttgcccggcggaagtgcaaggtgccgttcgacgtcgcttcgaaccccgaatttctgaaggagggcgcggctgtcaaggacttcatgtcgcccgaccgcgtggtcgtgggcgtcgaaagcgaacgggcgcgcaagctgatgaccaagctctaccggccgttcctgatcaacaatttccgcgtgctgttcatggacattccctcggccgagatgaccaaatacgccgccaacgccatgctggcgacgcgaatttcgttcatgaacgagatcgccaacctgtgcgatctggtaggcgccgacgtcgagatggtccgcaaaggaatcggttccgacgcccgcatcggcagcaaattcctctatccgggctgcggttacggcggctcgtgctttccgaaggacgtgaaggcgctggcccacacggcacacgaacacggctacacgatgcaggtgatcgaagccgtggagcgggtcaacgaacgccagaagtcgatcgttttcgacaaattgcagctggcgctgggcgacctgcgcggcaagaccgtagccgtctggggactcgccttcaaacccgaaacggacgacatacgcgaagcaccggcattggtcgtgatcgaccggctgctcgaagcgggagcgacggtccgcgcatacgatccggtcgcagccaacgaatcccgccgcaggctcggcgaagagcgcgtttatcatgccgcgtcgatgtacgaagccgccgaaggagccgacgccgtcgcgctgatcaccgagtggaagcagttccgcatgcccgactggacgctcctgcgttcggccatgcgcgacaacatcatcgtggacggccgcaatatcctcgacaaggaggaggcgctgaacgccggattccgctattacggcatcgggaaataacaggtgcagcggcatccggaatgcaatccggcaggctgcaggaagcggtaaccgtatataacacgaaggccggagcatacactccggccttcgtgttatcgtctcggcgatcctacatgcggaccttgacgatgatcttgcgtatgcttccctcgcccaccatcggcgcatggccgtcctcaggcatgaggatcgtaaactgaccgggacggatcgtgtagcaggtctgcggctcgtcgtcgaagagctgaatatccttctcggcatcgaacccgcccagcggtttgctcaggacggcacgttcgctccagccgaaggtctcgcgctcgccgcggacaagcacctgaatgtcgagataggcgttgtggatttccagcttggcgtcggcgggcttcttcaattcggtatccatgacattcacataaatatccttgccgtcgagttcgtggataccggattccatcttcacccagtcggtcgaggcgatgaaaccgaaagctttttccagacgcggattcaacgaataatagagcgcgctgtttttcaaagagtcgaaaatcataattatatcggattagttgttcattgcatttttccgcagccggacgacgacgggatggtggtccgagtaatcgaccgtgggcacctcgtacgaaagcgcatcgaacccctccgagctgagcacgtagtcgatccgcagggtattgaaaaatccgcggaacgtatgcgaatagcccgaaccgcactggctgaaagcgtcgttcagtcccttggccatggtgcggtaaacgtacgacatgggcgtatcgttgaagtcgccgcagacgatgcaccgcgaacgccacgcctccaccaccaccgcgatgctgtccacctgcgcggcacgcagcacgctgttctcgcggaaacggcccgccatgctccgcagtttgtcctcgcgcgccgtatcggagagaaatccgcggctggtgaggtagtcgttgtcggccgccttgatcgccgtcgaacgcaggtggttgttgaacacccggatcgtatcgtcgccgatcagcagatcggcccagaccgaggtgccgggggtcagtacgacgccggagcgcaggatgcggtatttgctcaggatcaccagcggcgcgccgtaaagcgaatcgggcgcctgcgtacgtccgaaaacagcgctttcgtacttctcgtccagcaatgcgaactcgtcggactgcccggccagccgcgcgttgaactcctgcaggcagatgatatcgggattatggtcgccgatcaactgcagcacgtctcccacgctgctgagtccgttctcgccgtagaatccccgcacgttataggtcatcaccttgaaggcgcggcggtcgtacctctcgtcgccgtaattacggcggaactcaggtctgtagaaaagcgacaccttgaaaagcccgacgaccaccagcgcgaccatgattccggcccgcaccagccgccagcggatgatccaatagagcgccagcacaaccgtgacgacatagaccgccggtgcggccagccccagcacggggaagaaccacacccggcccggatcgacgtaggggacgaaaaaggtgacgaccatcgtaacggccgttacggccgtcaggagcgtcatcagcagatcgagcagccgcagcaacagactgcgccgcggcttacggccgcggtcgctgtcataaccgctgtaataggtctcggacatagggtcagaaacggattatgccccgctgtttccaccattgaagcagcaggaagccccacaacatgcctcccacatgggcgaaatgcgccacattgcccacgccgcgccagcccaagaacagttcgatcacaccgtagatgacaacgaaccatttggccttcatcggaatcgggggaatcagcagcatgatgaccgcattggggtgcaggacaccgaaggccagcagcagtcccatcacggcgcccgaagcgccgaccagcaccagcgggaattcgccgaaggccagtgccgtcaggtattggataagcgccgcgccgatgccgcagaccatgtaataggtcagaaagcgtttctgccccaattcatactccagcgtacgcccgaacatccagagagcgaacatgttgaagaagatatgttcgaaattggcatgcaggaacatgtaggtgatgaactgatagacatggaaaaacggcgtaccgagcgacagggcgcagtactccatgatcgcattgcccgccttcggcagcaacgccgtggccatgaagatcaggacgttgatgattatcagattcaacaccaccgggggcgtctggaaataattcctgttcataaattatcttttttcagtttcgttgcggttttctccccgtcccgtctctcagggctgcaaacgcggcccggcctgcattcgcaaacccgatcatgcggggagcggttttcaattttccgccccggaaacaagccgcatggagccggccggatcagggcgccgaaaatttatgcaaatgtacgtttttccgccggattatcccaacttggcccggatatcttcgacggttatctcggcggttatggctttgcccgatggcgaaaagctgaaattgcccgaagcggccagccgcgcgagcagtgcggcggcttcgtcgcgcgacatgaggcgcgcagtctgcttcgcggctccgcgcgccatcacggcggcgatcttctcgcgccgcacgtcggccagcgacacgggcgtcgagaaggcctgcagcagttcgtaaagcagctggtccaccgagtcggcaggcatgtcggccggcgtgcccttcacctcgacggcgcagtcgccctgaaaatcgagatcgaagcccagcgatgcgaattcgacggcattctcttcgagcagggcgtattcgctgtccgaaagcaccagccgttcgggaaacagcagctgctgactcaccgacgaaccgctgccgagcatcttcaggtagtcttcgtaaagtatccgttcacgggcgcggcgcacgtccaccaccacgaaccgtccgcccagcagggcggcgacatagccgcctccgagcggcagcggatcggtaaattcgggccgcccgtcaacgtcgagacgctgttgctcgaccgtcgcttcggaggggatgaattccagctcgctggcatcgaaaccgctctccgaagtcacttcgaagcccccgcccgacacgaaatcctcgaaggcgtcgtccgccgcagagggaatcgaaaattcgtcggcgccgctgccggccgcaggaaatcccccgcccccggcgctgcgcaggccgcccggcaaagcgacacccgaaccgcgtcctccgccgcgcggagcgaagcccgcgccggcattgtcggagagagtttggccgttgtcgctgaacggcacgtcgaatccggcgaaatcgacgttcggatcgggcgccgacgggtcgatgtactcttcgcggaaaggattgtattcgctgttggacatggcccgcggctcgctgtagaccgcccctttggtcagcaccggaatctcgacgatgccttcgcggtcgaaatccatcagcggcacggcgcccgtcttggcgagcgtttcgcgcacggcggcgttcacgatctgccacacggcctcctcgtcggcgaatttcacctcggttttctgcgggtggacattgacgtcgatgcgcgacgggtcgatcgtcaggtagaggaaatacgacggcgaactgctttcgggaatcagcttctcgtacgccttcatgatggcgctcgtgaggtacgaactcttgaaatagcggccgtttacgaagaggtactgttcgccgttgcgccgtttggcggcggcgggacggccgatgtagccttcgatgcgggcgatcgaagtgtcggcctcgacctccagcagattctgcttgatatggcgtcccaccacatcgacgatacgtccggcgagcgacgccgcacccagcgtatagaccgaggcgtcgttggcgtatagctcgaaggcgatctgcggattgcacaacgccacacgctggaattccgacttgatctgcgccgccgacgtggtgctcttgtccagaaaacggcggcgggcaggcacgttgtagaaaaggttgcgcacgaaaaactgcgaccccacgggacacatcaccggggtctgtccggcgaactggccgccgttgatctcggtctgcgtgccgacttcgtcgccctcctgccgcgtccgcagttcgacctgcgccacggcggcgatcgaagccagcgcttcgccgcggaagccgaaagtattgagtgcgtaaatatcgtccacggaggttatcttgctcgtggcgtggcggtcgaaagccatgcgcgcgtcgatgggcgacatgccgcagccgtcgtccacgatctgaatcaggtccttgccgccgtcgcggaaattgacctttacggtgcgtgcgcctgcgtcgatcgcattctccatcatctccttgaccaccgaggcgggacggttgacgacctcgcccgccgcgatctgattggctacgacctccggtaataatctgatcttatctgccatctactcctgataatcgttgggtaccaccgtgataggctgctcctgccactcgacgtcggaaatgcccgactgatcaagcccgttgcgccgcaccgtctcttcggcacccaccgcttcggtctgcgccggggccgaggtccgcgcccgcaggaaaacgtcggcgagcctcggatagagaatatagatgaaaagcagcaccagaaccgcgcctacgaccatcttccaaatgcggtcgcggcccgtcttctcctccttggaacggcgtgcggcgcgcgcatcgcgctgggtgcggatatattgtccggggcggtattcaccgccggcgtcttcggctctttcgccccgaagctcggcgcggcgctgttcgcgcgcctccttttcgggatcgtaataacgcggtatgtagttgaacttgttcgcgtgcttcttgaacggggtgaaacctaacatggcatgtcctcctatttttttgtaaagatacgaattcttccgcaattttattgccccgaattcctttttccggcacggacgcatgcgtccgccgcgcgcgggaagcgggttgcggccggggcggctcccgatctgccaatacggcggaatgccggaacccgcaggggtattcagcactccgccgtagagacgaaaccgtatcgtttcctaacggaagaaactcttcatccgctcgaaaatattctggtttttgaccgagtcggctttctggaaaccgggctgccgggacaactcctcgaccagccgcttctcctcggcattgagtttcgacggaatggtgatgtccaccacgaccagctcgtcgccgcggccgtaaccgttcacgtcgggcaaacccttgccgcccagacgcagcaccttgccggcatgcgttcccggagcgatcttgatcttggcgcggccgtctaccgtcggcacctcgaccgtaccgcccagcagagccagcgtcacggtgatattgaggttgtgaatcaggtcgttgccgtcgcgcatcagttcgggatgcggctcctcttcgatcagcacttgcaagtcgccgttgacgccgccgtggcgcgcggcgttgcccttgcccgtgacggtgagcatcatgccctcgcccacgccggccggaatcttgatctccacgacctccgaaccgcggacggtgccttcgcccttgcacttgtcgcagggcgaagtgatgaccttgcccgtaccgccgcaggtcgggcacacactctgggtctgcatgcggccgaaaaaggtgttttcgacgcgcgtcacatggcccgtgccgttacacgtcgagcaggtcgaataggaatcggcgtccttggctcccgtgccgccgcacttgtcgcaggcgacggtcttgttgatcttgagcttcttggtgacgccgttggcgatctcggccagcgtcagcctgaccttgatgcggatatcggagccgcggttcacgcgccggccgccggacgacgacgaacggaacccgcccccgccgaaatgtccgccgaaaatatcgccgaactgtgagaaaatatcctccatcgagaagcctccgccgctgaagccgccgaaaccgcctccgccgcctgccgcgccgctcatgccggcatggccgaactggtcgtaacgggcacgcttgtcggggttcgacaacacgtcgtaggcttctgctgcctccttgaatttctcctcggcctgcttgtcgcccggattcttgtccgggtgatactgaatggcagccttgcggtaggccttctttatttcgtcggcgttagcgttcttctggacgcccagcacttcgtagtaatccctcttttcagccatcttctcactctcctacaacgacttttgcaaaacgcagcaccttgtcgcccagcatgtagccggtctggacgacgtctacgaccttgccctgcatatcctctccggcggcgaacttggccacggcctcgcataggtcggcgtcgaactcccggcccttgacgtcgatctcggtcacgcccttctgacgcagggtttcggtaaatttctgcgatatcaggttcacgccggcgcgcagcgcttcgatatcgtcgcttttctgcatggcatcgaccgcccgctgcacgtcgtcgcgcacaggaagcatcgccagcaagacgtcgcggcctccggtctgcaccagatccatcttctccttgagcgtacgcttgcggtagttgtcgaactcggcctgcagacggatgtatttatcctgccattcggcgactgccgccgctaaatcgggtgcggcgccgctgtcggtcgcgtctgccattgtgtcagtcccgtcctgcggctcgtctgacacattggcacagggttcgccgtcgcacgagggataaccgtcgcccggctcgaacccttcgtcgccgttaatggcttcattataagctttttcctttttcatatatagttgtttttcagattttccgtcttatagtcgatcaaattgtataccaacctccggaagggcctatccgatgatgaaaatagcagggcgtttgttcatcgcgggcagttcggcggcacgccattcgcggacgcggagcgtgcggatgaattcgccgggagccgtgatgtccatggccaccgtcagccgcgtttcgggcgcaagggtctgcaacagctgctccatcagcttgacgttgcggtacggggcctcgatgaagagctgggactggccttcggcgtgcgcgcggcgttcgaaacggcggatcgcctgcacccgttcgggcggtttgacgggcaggtagccgttgaaggcgaacgactgtccgttgagccccgacgccatgaccgccatgacgatcgacgaaggtccgacgagcggcacgacacggattccgcggcggtggcaggcttcgaccaccagcgcccccggatcggcgacgcccggcacgcccgcttcggaaatcacgcccgccgaacgcccctcgacgagcggtttcaccagctcttcgacctcacgcccggcgacggtatgttcgttcagttcgcggaagcagagcgtgtcgatcgggcgcgccgcgcccgctttcgacagaaaccgccgcgccgtgcgggtattctcgacgataaaatagtcgagcgaatccataacggcgcggtttgctgcgggcagcacgtcccacggcgccgtttcgtccgagatcggacacgggatcagatagagtgttccgtacattttttcagttcagcgatttttcgttccaacaatccgacacggttcgcaatgcggacatactgcacggcgaaccagagactcagcgccatggccccgacgatcaccagaccgggcaacccgccgagacagagccagctgagcagaaatcccgcgatcgaaagcgtcagcggagctttccggacaagaaaggccagtgccgcgtagacgcatgccagcgcagccatgaaaatcccgacggcccgcatcgtcgcgtcgcccccggcatgcaccagcacgaccacgccgccgacaagcgcgaaaaacgcggcgcagagcatcgcgaccttcgcccggcccagctggtcgagggccgactccgcttcgacgcgggccgtcagcaggcgggtttcgagacacttcacggcctgcatcctctccgccggacagttgcaggcgggacatttgtccgctccgggcgcgatcaggccgccgcagtcgtagcacttcatcccgttattccttgagatagatgcgtttcacacgtcccgaaaccgaggtcatgatttcatacgagatcgtatcgagcacacgggccatcgtttcgaggtcgttgcccggcacgggcgagaagaccgacacttcgtcgccctccttcacgccgggaatgtccgtaatgtcgatcatgcagctgtccatgcagacccggccgatgatcggcgcaggctgtccggccacgagcaccgaccagcggccgcagcccagatgccggtccagcccgtcggcatagccgatcggtatcgtggccgtggtggtcggccgcgtgagctttccggcgcggccataccccaccgcatcgcccgcaggcaggcgtttgatctgcacgatgcgggttttgagcgtcgagacgggacgcagggcgtcgttgtgccggaacccgaagccgtaaagccccagccccagacggcacatgtcgaactgcgcttcggggaagcgctcgatggcggccgaattggccgtatggcggatgaccggataaggcagcgaggcggcgagctgcgcgctcatgcggtcgtagagggcgatctgcgcccgcgtataggcatcctcttcgggcatgtcggcgcagttgaggtgcgagaagaccgaagccgccttgacctgcggcgtcgcggcgagcgtcgcgcacaactgcgcgatctcctgctccacgaaccccagccggtgcatgcccgtatccagcttgacgtgaatcggataacggctctcgcccgcgtgcgtcacggcatcggcgaaagcgccgagcgagtggaaactgtagatttcgggttcgagccggttggcgatcatcacgtcgaagctgtcggcgtcggcgttgagcaccacgatcggcatcgaaatcccccgctcgcgcagcagtacgccctcgtcggcgaacgccacagcgagatagtccacgccctgatgctggagcatctgcgcgacttcgaaatcgcccgcgccgtacgaaccggccttgaccatcgccacgagccgggtcccgaagctcagcttcgaccggaaatagttgagattatggatcatggcgtcgagatcgacctccagcaccgtcgtatggcttttgcgggagagcaggtgcaccagtttttcgaaacggaaatcgcgtgcgcctttcagcaggatcgcacgcccggccacggcgtcgcggttgatgcgcgcgacgcattcgtcggtagccgtaaagaactccttgtcgcaggcgaacagcgcggcatagcgtttcaggcggggaccgataccgatcaggaagtcgattccggcgcgtgcgaccatgcccgccacgcggctgtaaagctcgtcgtccgagagaccgctctgcgaaatgtccgacagcacgagcgtacggcggcggttcagcgccacgctgtgcaggtagtccagcgccagcgccagcgaattgaggtcgaggttgtaggcgtcgttgataagtatcgagtcgttgatgccctccttcacttcgagacgcatcgccaccgaaggagccccggcgaacgaaggggcgggatagcgcatcgcatcgcagaacgcctcgacgatctgggcgttgcggcgcgaagcggcgttgcctatgaccgattcgggcacttcgggatatgaggcggcatcgacgggacggcggtcggcgaaatgcgccgcgaccatacggcccagcggctcgtaatagctgtggtagatgattttggaagcgctgcgggcgagaatcatcttctcgtcgcatttctgttccagattgatgaaattctcctgatgggcgtcgccgatcgaagtgaagatcaccgcgtcggggcggatgatgcgttcgagccgctccatctcgccgggcttcgagatgcccgcttcgaaaatcgccagctcctcgtcgccctccagcatcagcaccgaaagcggtacgcccagctgcgaattgtaactcttcggcgaacggtaatatttcatgccttcgggcagctcctcggcgatccactccttgatgacggtcttgccgttcgagccggtgatgccgaccaccgtaccccggaactgcgcccggtgataggccgccagccgctgaagggcttcgatggcgttgtccacctgcacgaaaccgcactccccggtgcacgaggaggcttcgacgccccgctcgacgaggaacgcacgcacgccccggctctgcatgtcggcgatgaaatcatgcgaatcgtggttcgcgccgcgcatggcgacgaacatcgggcgacaccccagctcgcacgaaagcgaccggctgtcggtaacgaccgaccgcacctcggaatcgcagcccgaaaactttccgccgcaaatggcggcaatacgtgaaagtctgtaattcatcctcttatcatttttccgttccgtccgccctgcggtctgtaggcatctgccccgcattcggccggaacgccgcgaaaaatcgtcagtccatcttaaaagtcacgatcgtaatgcccgccccgccgcggtcggcatgctcgtccttggcgctttcgacctcaggaaccgtgcgcagatagcggcggatctcctctttcaaggcccccgtacccttgccgtggagaatcgaaaccgaccccacgcccaccatcaaggcgtcatcgacgaaatcctgcacggcgtccagcgcttcggcggcgcgcatgccccgcacgtcgatatggtccctgaaattgagtttgcgggccgaaatatcgaccgagaccaccgtacgggccgtctgcgggcgcgtcgcttcgcggaactcgctgttcgacaccacggtcagcagtttcttgtctaccgtagtaagtatctgaccgaaggcgacctgcactttcttccccttgaccgactgcaccacgccgaccatatcctgcccggccatgcggaccttggaaccggtttcgacctcgcggggtttgggcggttcgggggcggcggccgcctgcgcttcgccgcgctgggttttgcgctcgatgcgccgctggcggcggcgttcgatgcgctcgatctcacgggccacctgcgcgtccttctcggccgtatcggcctgctcgaccgcatcgcggaagtcgtccagctcgcggcgcgccagccgcgtcagctctttttcggcctgcgcttcgcggatggtcctgatcgtattctcgatctgcttgttggcgtcggcgatcaaccgctgggcctcctgcttggcctttttcagaatctcctgccgctcggatttgatcttcgccaactgctcggcgtaagtctgctccagctcttcgaccttgcggtccgtcaggcggatgcggtcgcgtttctgttcccagtaatgtttgtcacgggcgatttcgcgcagctgcttttcgatgttgatatggtcgctgccggccttctcgcccgcaatgcggataatctcttccggcaggccgatcttgcgggcgatctccacggcgaacgaactgccgggcttgcccgtttcgagccggaacagcggccggatatgctgcacgtcgaacatcatggcgccgttggcgatgccttcggtgttcgacgcataatacttgatattggcgtaatgggtcgtgataacaccgtagcaccccttggccagcaggcgttcgaggatggcttcggcgatggcgccgccgatgaccggctcggtacccgacccgaattcgtcgatcagcaccagcgtcgcggaggaggctccggccagcatgttcttcatgttgagcaggtgcgacgagtaggtcgaaagatcgtcgtcgatcgactgctcgtcgccgatgtcgatgaagatcgaccggaacacgggcagttcggagacttccgacgccggcacgaggaatccgcactggaacatatactgcacgatgcccgtggttttcaggcagaccgacttgccgcccgcgttgggccccgaaatgacgaggatatgcttgcgacggtccagctgcatgtcgagcggcacgacctcgcggccctgcgcccggagcgtctgctgcagcaagggatggcgggcgtttttcagcatcagccggtcgtcggtcgagacgatcggcttcacgcagccgttctccgaggcccagcgccctttggcgcgcagcatgtcgatctcggcgaggtaatcgcccgaatcggcgatcagctccgcatcgggacgcaccgaatcggtgaactccgagaggatgcggacaatctcgcgccgctcagcgtattccagttcgcgcagttcgttgttgatctccaccacctcgaccggctcgacgtagaacgtgcgtccggtagccgactcgtcgtggatgaagccctgcagtttgcgcttgttggccgcggcgaccggaatcacggctttgccttcgcggatcgaaatctgggcgtcggcatcgacgatgccggcgttcttggcggccgacagcacggcctgcagacgtttggcggcctgtccctcgcgttcgcggacggcgcgccggatctccagcagaccgggcgaagcgttgtccttcacgttgccgaaacgatcgacgatggcgtcgatccgctgcacgatttcgggaaaggccgcgacgccgcggctgcgggcgtgaagcgccggatattgttcttcgcggttgagaatgaacgcgacgatgccgccgacgaccgtcagcgcacgatgcagcgtcaccacttcctcgacgtcgaggaatgagccttcgacgcgcaacttggcgacgatatgatcgacgtcgggatactccccgccgggaaattcgtgttccatatcgagcagcagacgcatctcgtcggcaagcgtcagccgccgggcgatctcgcgcgccgaggtcgaaaaggtctcgccggccagccgcgcacaggcggcacgcatggtacagcgcgccgcaacctgttcacgaagccggtcgaagccgatcttctgctcgaagtttgcaggataaatcatggtgctatgtcgggtagagggctaccgcagccgcctgagcgaatcgcgctcggctttctcggcggccttcgcggccttccggtcggcccgctccttcatcttctcagggttgcgcccgaagagcgaaagatggacgtaacggcccggatactgtttgacgtcggccagcagtgcggagagattctcgctggcccggttgagcgaatcgtaaagttcgggatcgttcatcagcttgcccaccgtgccctcgccctgcgcgatgcgggccaccagatcgtcgagatgcccgacagtctgcgaaagtttgacggcgaactcctcttcggagaactgcgcgacgacccggtctacattgccgatgatgctgtccacgcgctgggcgttgtcgccgagcatgtcggagaacttcgaaaggttctccagcgcgcttttcaggttgtttttctcggcggaaagtatctgcgccatgtcgcccgtcacggagttgaggttgccgagcgtcccggcgatattgccggcgttgtcctccatcagcctgttgaggttgtcgagcgcacgcgacagatcgccggtgagctgcgagactttctgcttgaagaaatccagctccgaaccggccatgtccatcaggtcgcggtcgcggctcgcccgcagcgtatcccccttgtgcaggtaggtgtcggccctgccgtaggttatttcgatcgccttggcgcccatcagcccgttgctgaaaatcttggcttccgaatcggtcggaatgcggtattcgcgcttgatggtgaaccgcagcacgactttgtcgctgcgggcggggtcgaacgacagacccgtcaccgaaccgatcttgacgcccttcatcatgatcggcgaagcgttctgcacgccgttgatctggtcgtaagccgcataatattcgacattgcggctgaaaatatcgaatcctttcagaaagcgaatacccgcccatgcgacgccgatcatcgccacggcgaaaattccgatcttaacttcccttttcatatctcgtatgtttttatttcacgatccgagttccccggcagctcaccacaaaggcgtcggggaagaccttgcgcaccgccgccagttgtttctgcgccgcagcgcgggtctcgtattcgccgacgcaatacttataacggtatttgccgtcggccgtatattgtttcaccttgccgcggtagctcttgaaccgcgcggacgaagccggcacggtctgggggctggccagcacctgcacggtatagcgcagcggctgcgcgtcctgtttcggagccggctgcttcggggtttcggctttcggcgtctcacgcttcggggcgccggccttgggagtctccgttttcggcgtctgcgtttcggacgtctcccgctctgccggcgcagtcacggattcggatttggcggcggagtccttcgcccccgcctttccgccggccccgcgcacaggctccttgccgacgaccacttgctccggtttctgctccggcttaggcgccgcagcggcctcctcttcggcgttgcgcgtttcgagcacataggccgaatagttcttcacgccctcgtaaatcgaacgggcgatctcggtctggcccttctccgacttcatgtaggcagcctcctgcgaattggagaggaatccgatctcggtcagcacgcccggcatgtcggtcgcatagagcacgcgcagcagctggggtttgatgccccgcgaatggcggcccgccttcaggtagttgttctgaatgcagcgcgcgatggccatgctgtattcgccgtaggtgaactgcaggttctggatataggcccgcacgatggccgccgtacgttcgtcggacatgtcgatcaggtcctcgcggttgttctcgaacagcgcgttttcgttgtaacgctgctccttggggctttcgcccatgatcagcgtctcgacgccgcgcgcggccgtggacttggccgcattgacatggatcgaaatgaagaggtcgccgccggccttgttggcgatgtcggcgcgcgcctgcaggtctttcgccttgtcgggtcccagcgccttgtccgtcttgcgcgtatagaccaccttcacgccgggcatgccctcctcgatcattttgccgagcttgagagccaccttcagcgtcaggtccttttcgctggttccgccgtagtgcgcaccgggatcgttgccgccgtgaccggggtcgatcaccacaacttcgactccgtgcgcaatattcccggccgatgccgcgttcgtaagaacggttacggccgcaaatgcgaataacaggaacagtcgtgtgcgcatatttaagagatcaagtgtaagctttctgtaattttttacctatctttgtcgcgcctgaaaaccccgcgggaggtcgccggagacctgattcaggcgtttttgccgacatgtcggcaaaggtacgaaaaattattggaattttggataaacttagggtaaaatatctgttttcggcggcgctgatcctgctcttcgcccagctggtgttcggcgcgtccgcaccccggagcgtgttcgccgcagccgccccggacagcacccgcacccacgattccattccggcatatacccttccggaagccgcggccgaagttcccgaagccgcccgcacacgcagcgaacgtcgcgcgcaggcacgggccgcccgcgagaaagcccgccgccacgccgaattcgaagccatgtcgcaggaggagcgcgactcgatgttcagttcacaggtcgattcgctcatcgcccgccgggccgactcgctggccggcaggcaggccgacaccgtggcccgcgactcggtcaagcggccgcgcaagcccggcgccttcctcgacgatccgatttcgggcaagaacaaggactcgctggtgtacgacgtccgcaacaagatggtctacatctacaacgaaggcgacgtcacctatcagaacagcaacctcaaggccgactacatgcagatcgacatgaactccaagctgatccacgcatacggcaaacccgactcgctcgaaggcaaggccatcgtcaccaaacccgaattctccgacggcggcgaagccccctacaagatggacacgatcacctacaacctcgaatcgaagaaggccaagatcaagggcgtggcgacacagcagggcgacggctggctggtgggcggcagcgtcaagaagatgcccgacaacacgatcaacatcgagaacggaaaatatacgacctgcgacgaaacggaccatccgcacttctatctggcgatgaccaaggccaaggtcattccgggcaagaaggtcgtcacggggccggcctatctggtcatggaggacgtgccgatctattttctgggcattcccgaaggcttcttcccgatcagttcgggtcccaagtcgggtctgctgatgcccacctacggcgaagagtacaccaagggattcttcctgcgcgatctgggctactacttcacgctgggcgattacgccgatctggccgtccgcggcggtatctacacgctcggttcgtgggaggcgtcggccgcatcgcgctacatcaagcgctacaagtacagcggcagtttcaacatgcagtactcgaacatcaagacgggagagaaaggcgaacccgactatatcaagcagagcaacttccgcatccagtggacccattcgcaggaccccaaggccaaccccggttcgaccttctcggcgtcggtgaacttcgccaccagcggttacagcaagtattcggcgaccaacctcaacgacattctcgccacgcagaccaactcgtcgatcgcctattcgaagaactgggccggcacaccgttctcgctctcggcgaacatgtccatttcgcagaactcgcagaacaagaccatttcggtaaccctgcccacgctggtcttcaacgtctcgcgcttctaccccttcaaacgcaaggagaaaaccggcaaggaccgctggtacgagaagatttcgatgcagtacacgggtaaaatgaccaactcggtgagcaccaccgaggacaaaatattctcgaaggagacgctcgacaacatgaagaacggcatcgaacacaacatcccggtttcggcgtcgttcaacctcttcaactacatcaacatctcgccgtcggccaactacaacgagaagtggtatttcaaaaaggtcgagctggaatggaatcccgtcaccaacagcgtcgacacgctgccggcacagtacggcttctaccgtctatacaactacaacttcagcgtctcgacatcgacgaccgtgtacggcatgtacgacttcaccaaaaaacgccgcgaccgcaagattcaggcaatccgccatacgatcacgccgtcgatcggattctcgtacgccccggacttcggcgatcccaaatacggctatcagagcaactaccagtccgattcgaccggtacgttccgcccctattcgccctattcggtcaatgcctacggcgtccccagttcgggacgttcgatgtcgatgaacttctcgctgtcgcagaacctcgaaatgaaggtgctgagcaagcgcgacacctcaggcgtcaagaagatcaaactgatcgacgagctgcggctcagcggttcgtataactttctggccgactcgatgggactctcgaccatccccatctcgttccgcaccacgctgttcggcaacttcggcatcaacctctcggcgacgctcaacctctacaagctgacccccgacggaaaactgtacgacaagctcttccttccgggacgtatcgaatcgacgggctggtcgttcggctacaccttcaaatcgcgtcaggaccgtacggaacgcgccatcaacgacatcacgagcattccgcccgaatacatgaacccgttctacgacccctacggcaacatggaccccgtactgcgaaggcagtacatggcccaaacctattacgacttctcgctgccgtggaacttcggtttcaactacacggtcaactactccatatcgcggggaaattatccgcccaaaggctataaaaagaacattacgcagacgatcggcttcaacggcagcgtcaatctgacgccgaagacgggcgtcacgttccaaggcggttacgacatcaagcaaaacaagctgacgacctcgtcggtctccatttcgcgcgacctgcactgctggcagatgtccttttcatggattccgttcggctaccaccgcagctggagtttcaacatcggcgtcaaggcggcgtcgctctccgacctcaaatacgacaagagtcagagtatgtacgacaatatgtactaaacgtacaaaagccgccgcccgtccggaaaatggaaacgccctgccgaggcagggcgtttccatatataatagggtgtccgcacaatcgggactgcccctgcggagctaaattttccggacttcaggttctttgcggtcgatgtagttcggatagcggaactgcggcatgccgagcgccatgacagcgcagatacggcggtctcgaagtcccagcatccggttcagcccgcctttcccgtcctgccgcacggcggtcagcacgaatcccatgtagacctgactcacaccgagcgattcggccgtcagcgaggcgttctgataagcgaggttcgcgtcctcggcgccgaagcggctctccttgggcgcatggatgaacagcacagccgtcgcaccccgcaaaatgcggtcgacgccctgctccgcatattcgcggcgcatccgtctgaacgccggaatgtaacggtaaacgcccggcagcagccggctcagccaaggccgcacgagcgggttagacagacgcttcacgatccggccgaaaacgcccagcgtatattcgacgatttcgcgccgcatagcggggtccgtcaccagcgtataacccagctggcgggcgttggtcgccgtcggcgcgcggtcggcggcggcaacgatgcggtccagatactcctgcggcacgggacgctgggaaaaagcgcggttcgaacgccgcacggcgagcagcagttcgacctgttcgggcgtcggcaaagccgcatagtcgatcggatgcaccttctccgccgggaaatcggcatgttcgaccgcccccgtgggacatgccgccgcgcaatggccgcagacgatgcagttttcgggtttatgcagcgtcaccgcagccccggccttctcctgaacgaaaatctgcgacgggcacaccttcacgcagcggccgcagcggatgcagatcgcatcatttactcgaatcgtattctccatcatatctttcaaattttttcaatatctttggcatctatccgacaaacagcatgcaccccatcgtcatcaaacatttcagcgaaatctccgccgccgagtaccaccgcatcgtgcaggcccgcgaagccgtctttttcctcgaacagcacatcaccgaacccgacgccgacgaggtcgatccgcagagcgtctttctctggacggaggaggacggccgcgtcgtcgcattcctgcggatcatccccgcagggatcgtcggcgccgaggcatccgtcggacgggtgctggtagacgccggttaccgccgccgcgggttgtgccgccgcctgatgcacgaagccctgcggcatatcgcccggacgtggggtccgcagcccgtccgcatctcggcgcaggagtacctcgtcggattttacgcatcgctgggcttcgaagccgtttccgggacctacctcgaagccggcatcccgcatgtcaggatgctgagacggtaacaaaaacaattccggcggcaaaggaaatccctgcggccggaatcgtttttaggattaatgcttcaccgacgccatctccgcggggttgtgcttgtatttgaacaccaaggcgaagaccacggccaccacgagggcgtagcctgcgaagatgtaccacgaatcgggccagccccacgcatcgacgacggcgcctgcagcgtacgagccgaagaaggcgccgaagccgttggtcatgatcatgaagacgccctgcgccgaagaacggatttcgcggctggtctccttctcgacgaacagcgaacccgaaatgttgaagaaatcgaacgccacgccgtacacgaccatcgagaggatcaggaacgccgcgcccgaaccgggattgccgatgccgaagaatccgaagcggagcacccacgccagcatcgaaatcagcatcaccttcttgatgccgaaacgccggaggaagaacgggatgagcaggatgcagaacgtctcggacatctgcgagagcgacagcaggatcaccgagtgtttcacgatcgccgaatcggcatactgcggcatcgacccgaagttctgaatataggtatcgccgaaagcgttggttatctgcagagcggcgccgagcagcatcgagaagatgaagaagacggccatacgcttctccttgaaaagcgcgaatgcgcgcagccccagcgtgtcgatccacgactgcgacttgacgttgcggtccacgggacatccgggcagcgagaaggagtagacggccagcacgaacgacaggaacgccgaaacatagagctgccaagcggtgagcttgatctggatgccgccgatatgcgtcagatcgacgaaccacatcgcggcgatgaatcccacggtcccccacacgcggatcggcggaaagtgtttcacggtgtcgagtttcgccagatcgagggcgttgtaggccaccgagttggacagcgcgatcgtcggcatgtagaacatcacgctcagcagcatgcaactatacaaaggcgcataggccgtctgcgaagccgccgccacgaggaaggcgccgctgatcaggtggcagatgcccagcagcttctgcgccggaatccagcggtcggctatgattcccattacggcaggcatgaacagcgaagcgatgcccatcgtcgcgaagaaactgccgatctgcagtcccgtgaagtcgagtccgccgcccagataggcgcccagcgaaataagccacgagccccagatggcgtactggaggaagttcataacgataaggcgaaacttaattcccataattctctgattttacgttattttaatttcaggttcattttagttcggaaacgattaaaacaaatgtacgaaatttttttcggaattttctttgcaattgaaaaataaagttctacttttgcatcaccaaaacgtcattgagctatggtgtaatggtaacacaacagattctggtcctgttattcttggttcgaatccaggtagctcaactgaaaagcgaggaattatcctcgcttttttcattttatccgccggattccgctgtttcgatttccgaaacaatccgcaggcccgataccgctaatcgacactgcggcaaaaaccggaccgccgattttcacaatgcgcggccgcaccccgccgctgtttcgaaataaggcgcacaaactcccttcgatttctgttttccgtcttgtttgacccgccgaaatgcagtacgtttgtattgcacaggagatatgaagaattcaagtgggattgtgcaaggggcgggttacacccgcaaaagtgacgcaagtggaaaatccgtcaggatttgaagcacaggatagacatatggagctagacgcaaggttccgtttattcctggaagacttcgggggagggttctaagccctccctttccaattctgccacgatcgcacgctgacgcttgaagaaatgaatccgctgcagctccccgctgcacgaaaccagcgtcgcaaaacggctcagcgacgtaatccaacgcctgacatgctcgaacatgcccggatcggcgcttcgcagcgaattgatcgagaacgcctcgatacagctcgcacggtagtggcgcgccgcgacatagcagtaagtcgcctcgatatccatgtccgatatgtaaatagacaccggcttcccgctgcggaactgtccggcaacggctatctcctccagctcgtcgagcagctgcagcagttcgcccttcagcatctcgacgctttggtcggttatcaggtgcatgttgcggaacgcgcagatggcattgacccagcgcttggtgcagctgccgtcgaacaccagcgtcgtcgcaggcatcagctgcgcctccttcagcaggtcgcggtaactccgcaaaagcgcatcgggaactttcatatcctcgaatttagtcgtcgaacaatcgacaagcccctgttggtaaagccacttgaagagtttgaaattggtcagtccttcgtagcgcatgtaaagcatccgcgggaacgagtttccggcgatagcctgctccgcatcggcatcggacgacacctcccggtaaaaaagtgtatcctgatcgataacgcccgtatagtcttcgagcgccgtatggtaatcgttaaagctaagacggaaaagcacgtttccgaaatcgacggcaccgacagcgcggtcgagcgaaaaattcatctgggccgaaagaacggccgcttccccgaaggtaaagggcacctcgccgcgcagacggcggtaagccgcttcgcggccgatgttgagtttatcggtcagtatggctgccggattggtatattccggggtaccgttttgaatagcggcgatcagcgccgcattcagtttgtcaagaggcatagtacaagtgttaaatctaaatcaaattctcaatcccaaccgcaaatttagtaaaatattgacaaattgatatttttcggacaagaaataaaacaaaagggaaccttctcggaaggttccctttcatttgtctcggatgcggcggtcttacttacccagccccatcttttcgatcagcgccttggtctcaggcttgtggccgcggaagcgtacgtacagctccatcggatgctccgtaccgcctttcgaaaggatgttctcacggaacgatccggacacttcgcggttgaagatgcccttctccttgaaaagcgagaaagcgtcggcttccagcacctcggcccacttgtagccgtaatagccggcagcgtaaccgcctgagaagatgtggccgaaagccggagccatcgccgttcccggcacgacgggcaggacctgagaaggagccatcgacgccacttcgaactgctcgacgtcgccctcgaagggctcggtgatcgtatgccatgccatgtcggtcaggccgaacgacagctgacgcacgttcaggtaggcggccagatagttctgcgccgcgataatgcgctccacgatttcggcgggaatcggctcgccggtctggtagttcacggcccacaggtcgaggaattccttctcggtagcccagttctccatgatctgcgaaggaagctccacgaagtcgcggtaaacgctcgtgccggtctgcgactcgtatttgccctcgcccagcatgccgtgcagggcgtgtccgaactcgtggaggaaagtctccagctcgtcgaacgtcagcagcgacggcgcggtctcggtgggtttggtgaaattcatcaccagcgacaccagcggacgggtctcctcgccgtcctcgatcttcgtgccgcggaattcggtcatccacgcacccgaacgcttcgactcgcgggggaagaagtcgaggtagagcacggccataaagcggccgttctcgtcggttacgtcataggccgtcacgtcgggatgatagacctcgatcttgtcgttgggcgtgaaattcaggccgtaaagcttgttggcgagcatgaacacgcccttcttgacgttttcgagcttcagatagggcttcacgacctcgtcgttgagcgcatatttctcgtccttgtatttttcgttgtaatagccccagtcccacggcatcagctggcccttgaagcccagcgaagcggcatagtcgccgatcatccggtaatccttgtcggcataggctttggtctcgccgagcagctcgtcgaggaatgccgtgacggtcggagtattctcggccatgcggcgttcgagcacgtaatccgcgtagcacttgtaacccagcaggttggcgatcttcaggcgcaggttggcgatctgcttcacgatctgcgtgttgtcgttctcgccgcccagcgcacgcgaattgtaggcgcgccagagcttctccttcagggcgcggttcgacgaataggtcatgaacggcacatagctcggcgcctgcagcgtcacggtccaacccttctcgccgcgcgccttggcgtcggcggccataccctcccggacgaatgcgggcagttcggcaacgaccttaggatcggtaatgttgatcgtaaaggcgttggttgcggccagcgcgttctggccgaactgcagggtcgcggccgacagctcggaggtatacttgcggtaaagctccttatcggcgtccgaaagggcggcgccgttgcgggcgaagctctggtaggtgtcttccagcagtttcctgtcctctttcgaaagaccgcggccgggtttctcgtaaaccgccttcacgcgggcgaaaagctccggattgagcgaaacgtcgttcgacagctcggtgagcttgggctgaacgcgcagcgcgatctcctgcatctggtccgaggtcgcggcttcgagcaggttgtagaaaacacccgaaatgcggtcgagcagcgccccctgacgctccagcgccacgatggtgttgccgaaggtcggcttcttggggttattgacgatcgcctcgatctcggcgcgcgagcaggcgatggccgcatcgaacgcaggctcgtaatccgaaagctcgatctgcgagaacggcggcgtctggtggggcgtgttccactccgccagcagggggttggtggtatccagttcgggcagctgcgctttgggaatcgaattgtcggcgcagcctgccgccatagctgaaaaggtcataatgataagtgcttttttcatgttactgcaaatattgggttatttttcacgattcgtctattgcccgtccgattccggttcgagggggatcggggcctcttcgtccggctgcggatcgggttcggcgagcaggccgcggccgcggagcatcgcccgcttgtcgggatcggccccgcggaaggcccggtagagcgtcatgccgtcctcggaaccgccgcgggcgaggagcttggtgcggaaatcggcggcgatcttcttgttgaacaggtcaccgctctcgcggaaggccgcgaacgcatccttgtcgagcacttcggcccacgtatagaagtagtagcccgccgaatagccgccgtcgaaaatatggctgaaatagggataacggtagcggggttcgatctgcggaatcaggccgcgcttctcgttgagcgcccggcgttcgaagaccatcgggtcgaacggttcgtagtcggtggtcgagtggatgtccatgtcggaaagcgacgcggcgatcagctccgtagtggcgaaaccctgattgaagagttcgctccggcgcagtttatcgacgaggtatttgggaatcacctcgcccgtacggtgatgcacggcgtactgtttcagcatttcgggttcgaaagcccagttttccatgatctgcgacggaagctccacgaagtcgccctcgacctccgtgagtccgcggtatttcacgtcgtggaacaggaaatggagcgcatggccgaattcgtggaagagcgtttcggtctcgtcgagcgtcagcagcgcaggggtgttgcgcaccggacgggtgaagttgcagacgatactcaccacgggagcgacgcgctcgccgtcccggtaggtctgttcgacatagttgccgcaccacgccccctgactcttgccgtcacgcggaaagaagtcgaaatagagcacgcccagatgcgactggtcggcgtcgagcacctcgtaggcgatcgcctcaggatggtagagcggcgccacgatgggctggaaggtgatgccgtaaagccggttggcgaggtagaagatgccgccctgcacgttttcgagcgagaaataggaacgcagcatctcctcgtcgagtgcatagttctgcttgcgcagtttttcggcataataccaccagtcccacgactcgaacgtcgcgcccggaacgtccttctgcaggagtttgtccatctcggccagctcctccccggcgcggtcgagcgccggcgtccatatctggtccagcagcgcgtagaccgcatcggtcgtgccggccatctcgtcggccacgacataggcggcgtacgacggatagcccagcatcttggccttctccgtacgcagacggatgaagtcgttgatgagctgcttgttgtcgtactgatcgccgttgttgcagcggttcaggtaggccttgtagatcttttcgcgcaggtcccgcttggccgaataggtcaggaacggaatcagactgggcttgtggagcgtgaagacccacttgtcgcccttgcccatcgcctgcgccttctcgcgcgcggcgtcgcggacacccgaaggcagtccctccagatcgtccgccgtcagttcgagcgcgaagttgttgttctcggccagaatgttgttgccgaacttcacggccgtaagcgacagctcgccgttgatctccttcagccgggctttctgtccggcgtcgagcagggcgccggagcgcacgaaagcgtcgtaggtcttcctgagcagtcggctctgctcggcgtcgagtcccagcgacgcgcgccggtcatagacatccttcacgcgggcgaaaagtttctcgtcgagccggatcttatcgcggtgcgccgagagcaggggcatcacctgctcctgcagggcctgcatccgttcgttggtttcggcggcgcagagcatgccgaaaatcagctcggtctgcgcgagcatctgtccggcgttgtcgtaagccagaatcgtattctcgaacgtcggctcgtcgttgttcgaggtgatggcgtcgatctcggcgtcgtgcagcgacatgccgcgctcgaaggcgggcatgaagtgttcggcgcggatcttatcgaagggcggcacgccgaaaggcgtgtcccactgggtgaagaagggattctccccggcgcttttcggggagttgcatgacgcaagtgccataagcagtaagagtgttgtgaataaacctgcaatacgtttcatctattcatgttattttatgtaactttgcgagctgaaaatacggacgcgcgcaaggcatccgtacaatgttgcaaagttagtaaattataagaggtatgcaacttttttacgcccccgacatcacgccgcccctccatacgctgagcgaagaggagtcgaaacactgcgtgcgggtgctgcgtctgggacgcggagatacccttcatataactgacgggaggggcaatttattttgctgcgagattacggacgacaatccgaaacgctgcgcggtgcgcgtcacggagacccgcgccgggtgggaggcgctcccctattcgctgacgatggccgttgcgccgaccaagaacgccgaccgcttcgaatggttcctcgaaaaggcgaccgaagtgggtgtcggcacgatcatcccgctcgaaaccgagcattgcgaacgccgggtcttcaagcccgaacgcggcgaacgggtcatcacggcggccatgaagcagtcgctcaaagcctaccgtcccacgctgcgtccgctcacgcctttcggcgaagcggcggccatgcccttcgaagggcgcaagttcatcgcccactgcgccccggcgcagtcgcccgaaggcaaagcctacctcccggcgacgctccgcaggggcgaggcggcgctgatcctgatcggtcccgaaggcgatttttcgcccgaagagatcgccttcgcacgcgcgaacggattcgaggagataaccctcggcgcgcagcggctgcgcaccgaaacggctgcagtggccgcagtggtgatggtctccgtggcaaacggttagcgatacggacaaaacggtccgcatcgccggttccgccgcaaggcggcacggtataaacagtataattacacacaaatagctcatgtttctctattcacttctcgcgctggcggtggtgacggcgctgatattcgccgcccctctcaaggccaaggtgtgggcgacgctggcagtcgtcgcggcgggggcgctctgggcgtcggcaacagccgtcggagtgcttgccggcggacataccgtacggttgtgggcgaccgacgtcttcctcttcggaagcgacgcaggctcgatggaccctctttcggcgctgttcgcgctgatcgtctcggtcggggccgtcgccgcggtgctctactcgcggggatatctcgcgcactacctcggacgcaaatccccggcccacatctcgctgcactacaccgcgctggcgacgatgttctacgccatgctgggcgtagtgacctccgaaggcggattttcgtttctctttttctgggagctgatgaccgtcgcatcgttcctgctgatcctgttcgacgccgagcgccgcgaagtgcgccgcgccgcgctggcctacgtgatcatgatgcacgtgggattcgccctgctgctcatcggcttcgtgcggttggacagcgtctgcggatcggccgacttcgccctattgggcgaatatttccgcacgcagcccgccctgccgctgttcgtggtcttcctcgcgggcttcggcatgaaagccggcatgttcccgatgcacgtctggctgcccgaagcgcatcccgccgccccgtcgcacgtctccgccctgatgtcgggcgtgatgatcaagacgggcgtctacggcatcctgcgcgtcacggcgcagatcgccgacctgccgacgctccgcaccgcaggcctgatcctgctcgtcgcaggcatcgtcacgggactctggggcgtgatcctcgccgcggcgcagaacgacgtgaagcggctgctggcctactcgtcgatcgaaaacatcggcatcgtcctgatcggactgggcatcgcggcgctgggcaagagttcgggcaaccagctcgcggcgatctgcggactttcgggcgcactgctccacacgctcaaccactcgctgttcaaatcgctgctcttcttcggagccggcaacatactctcccaaacgcacaccacctcgctcgacgcgctgggagggctgggcaggcacatgcccgtcacgggcctgctgtttctggccggcacgacggccatctgcgccctgccgccgctcaacgggttcgtctcggaactgctgatctacctcggcatgctcgacggcatcgcttcgggcagcgacgtgctcgcttcggcggccggactggccgcactggcgctgatcggcggagttgtgattctggcctttaccaaactctacggcacggtgttcctcggcgcaccccgcacgcacgaagtggccgaagcctccgaggtcgataatttccgcatcgccgccatggcgctgccgctggccggaattctcttcatcggactctttccgcagaccgccgtgagcgcggtaacccgcgccgcgggatttttcatccaccaccccgccgatgcggcggactacctgctgtcgcccacgctggcggccgtcagccgcacggcatggctgctgattctggtcgtcggactcttggcatggcttcgcagccgcgccctgcgcacgcgcaaggtgaccgacggcgcgacatggggctgcggcttcacctcgcccaacgtgcggatgcagtacagcggcgaatcctactccgaaggactgcagtctatcgccacgtcgctcacgcagaacagcggcgaaggcagcgccgtcggcaaaggcgagattttccctgccgcgcacaacttcgatatccgccacaaggaccgcttcgacaaacttttcgcggcgtggtgggtcgaactgctgcgcgtgataaacaagcgcgccatgcgcctgcgtacgggcaagatcaaccactacgtgctcttcgcactggcgtttctggtcctgatattcctgttgtccatctttaacctgatctgacgatgacggcactcaatacactcctgatcctgctgacggccgtctgcattccgggcctgataaaccgcacgcgggccgtgctggcgggccgccggggcatccgcttcgcccagcacctcttcgacgtgcgcctgctgctgcgcaaaggcgcagtctattcgacgaccgcttcggcgctgttccgcgccgtgccgtcggtctacctcggctcggcgatcgtcgccgcgctcttcatccccgtcggggagctgaaacccctgctgtcgttcgacggcgacatcgtctgcttcgcctacctgatggctctcggccgcttcgcgctgatcctcggcgccatggacaccggaagttcgttcgaaggcatgggcgcaagccgcgaagccctctacggcgcgctggtcgaaccggcgctcatgctcacggccggcacgctggccctgctggcgggccacacgtcgttcgcccggatcttcgccgaagcggcgacgggcgacctgcagttgaccgtcctgctggtgctcacggcctacgtgctggtgaagatcgtcttcaccgaaagcggccgcgtaccggtggacgatccccgcacccacctcgaactgacgatgatccacgaagtgatgtgcctcgactactgcggcacggatctgggcatgatcaaaatcgccgggtggctcaaaaccgcggcgctctcgatgctggcggccgacgccgtgacggcggcgctatgcccccactggtgggccgcggcgccgctggcggtactcctcaccggactctcggtcggcgtggtcgaatcgacgcaggcccgcaacaaactctcgcgcaacaccacattcattctcaccatcgcggctctggcggctctggttttcttcacgggctacctgctgcaactaaacatcagcatccaatgatactcccgctggtcatactctacgtcatcacgctcgtctatctggcgatcaccgaacgtttccgcaacttcgcgtcgatcatcggactgcaggggtggattctcttcgccgtcgccctgctgcgcctgcacgccatcaatccgctggaactgatcttcatcgccatcgagacgctggcgttcaaggccctgctggtcccggccatcctcttcgccatgatccgcaaaaccaagatcaaccgcgtacgccgctccggatcgtcgcagtcgggttcgctcctgctgtcgctcatggcgctggcggtcagcgcctcgatcacctactacatcgccgactcggccatcgacctcgtattcttcggcgtggcgttatacgccctgctgagcggcctgatcctgatcgtcctgcgctcgcgcatcttctcgcacatggtcggctttctggtgatcgagaacggcgttttcctcttttcgatggccataggcgtcgaaatgccgctgctcatcaacatcgccatcctgctcgacatcctgatctcggtgctgatgctgggcatcttcttcaccaagatcgacggcaagatacacgccgacgacgccgattcactcaccaacgtaaaggactgacgccatgatatattacctgatcgccagcatcctgatcgccgtcgcggcgctcttcgcccggaccaaacgtgcggttctcgccgccggcatactcttctacgccgttcagatcgccgccgcgggcctgctgctctggggcgggctttacgacacgacctcggccgcattcttcaccttcgacgcgctcggcacgctcttctacctgctgctcgtcgtcgtctcgatgtacgtcttcggtcactcggaagcctacctgcaaggggaggacctccgctcctaccgtctctatttcgccctgctgatgctgctcaccacggccatcgccggagcctatttcgccaacaacctcgccgtaacgtggattttcctcgaagcgacgacgctctgctcggcgggcatcatctaccaccgccgcacggcgcaggcgctcgaagcggcgtggaaatacgtcttcgtctgctcgacgggcatcgccatggcctatctgggcatcctgctgctggccgccgcgaccaaatgcgaaacgctttcgtacgaagccgtcgccgaagcggcctcgtcgggcaacccgctctacctgaagacgtccttcctgctgattctcagcggatacagctgcaaactggaactgttcccgctctacacggtcggcatagacgccaatttcgcagcccccgcgcctgcttctgcgctgatctccacgggagtggtcaacgccggattcctcgcgctgctgcgcgtctacaaactgctcgccggaacggaggttttcccgtgggtgcgctcggtactgctcatcgtgggcattctctcgctcggcgtgggcgcgcttttcctgcgccgcaccaacaactacaaacgcttcctctcctactccaccgtcgagaacatgggcatcgccgccatcggactgggcatcggcggcatcggcgtatgggcggcgctgttccacgtattctgccatacgctcgtcaaaagcagtctcttcctgcagatggccgtcgtacggcaggtgtatgacagctaccgcatcaaccgcatcggcgactacatccgcatcaaccgcgtcggggccgtcggcctgctgacgggcatggtcgtactgctggctttcccgccctcgccgctgttcgtctccgagctgatgatcctcaagcaggtcatcaccgaccggaactggtggctcgtggcggcactgctgctgctcatgtgcatcgtcatctactcgttcggatcgcgtctgatccggctctgctaccagcccaatcaggaccgtctgcacccctcgaaagcccacaaggcactctcgtggtcggccctgtcgctgctcgcggtcgccatcgtgctgggcatgtggcagccggaacttctgcaacggatcatcaccgaaatcgccgcgttatgaaatattatataaccgataatacagcccccgccgtaccgctgtcggaaattcccgaagcgtcgtacgccgaattctacgccgatctggccgccaagctggccgacgcgcgttaccatatagcccactatttcgccctgccgctcggcgaccggctccggttcttctgcctgctgctcgacgacgcggaggccaaggtgctgatcgcgtcgcacgccatggagtactacgacgagcaggaactcccctcgctcacggccctgcacccgcaggtgcatccgttcgagcgcgacatcgccgaacgttacggtgtgcgtttcgacggcatgccgtggcccaagccgctgcgttttccgttcgaccggttcgaccgcggcagtacgatggacaactaccccttctacacgatggagggccgttcgctgcatgaagtgaacgtcggcccgattcatgcgggaatcatcgaaccgggcgcgttccgcttcatctgcaacggcgagcaggtgctccacctcgaaatcgcgctgggataccagcaccgcggcgtcgagcatgaattcgagactacggccaaccgcctgcggcagatgtgtctcgcggaagccgtcgcgggcgacagcgccgtgacccacgccgccacgttcgcgtcggcggtcgagaaactcacgggcggcgtcccctccgcacggctcggcgtcgaacgcgccgtggcgctcgaactggaacggatggcgatgcagatcgccgacacgggcgcgctctgcatggacgtcggctaccagctggggcaggtggcctgcgaagcgctccggacaatgacgatcaacaccacgcaggcgtggtgcggcaaccgcttcggcaaggggctgatccgccccggcggcacgaaccatccgctgacggccgcaaaggcggaaacgatccgccgcaacgtcgcgcagatcgcccgccgttacgacgaagtgcgccgcgacatcaagtcgtcgccgacgctgctggcccgcttcgagcagtgcggcatcgtgccgcgcgaggagatgctccgcatcggcggcgtgggtcaggcggcccgcgcgagcggcgcggcccgcgacatccgcgccacgcacccgtggggcgttttcgcaggaacgatccggcacgaaagcattgtcaaacgccacggcgacgtgatggcgcgtctgatggtgcgctgccgcgaggtgctgcaatcggccgggtatatcgaccgcctgctggcggactatgtccccggaagcctgcctgcacccgattatgccgctccgcccgcacccgattcgctcgcgttcgggctgatcgagggatggcgcggcgaaacgtgccacgtcctgctgaccgacgcccaaggccggatcgccgcctgccgcatcaaggaccccagcctgcacaactggctggcgctggcgctggccgtgcgcggcgaaggcatttcggacttcccgatctgcaacaagagtttcaacctctcctactgcggccacgatttgtaaagacgaaaaacatgatactaccgaaaataaaagtactgcgcagccacgggaaacaatacattcccgatctcgacgccgtcgaactgaccgaagagttccgcggacggcccgaactgaccgaaaccccggacaccgcggacctcgaacgggcagcggcaatctgccccaccggggcgctgaccaccgcgccgctctcgctcgacctcggccgctgtctcttctgcggcgaatgcgcccgcacggcgccgcgcaatatccgcttcacgaacgactaccgcatcggctcgccgacgcgcgaaggactcgtcgtgcggcccggcgacaaatgcgtgcggttcgaccccgcggccgtacggcccgaaatcggccgctacttcggccgctcgctccaactgcgcgaggtctgcgccgggggcgacgcatcggtcgaaatggaactcaacgccacgggcaacgtcaatttcgacttgggacgttacggcatcggcttcaccgcttcgccccgccatgccgacggcgtggtggtgtcgggtccgatcacggtcaatatggccgaagcgctccggatctgctgcgacgccgttgccgaccccaaaatcctcgtcgtctgcggctcggaagcctgttcgggcggcctgttcgccggcagccgcgccgtggaccgcaccttcttcgatacgcacgccgccgatctctggctgccgggcgccccgactcatccgatgaccttcatcgacggcatcctcaacctgttaggcaagaaaaaacgcgaatgaccatgcaacgactccgaacgattttcgcctcgttcttcaagatcgggcttttcaccttcggcggcggatacgccatgctgccgctcatcgagcaggagctgatcgccaagcgcggatggatcgagcacaaggaattcttggacctgctgaccctcgcgcagtcggttcccggaccgatcgccatcaatacctcggtattcgtcggctacaagatgcggggtctcaaaggcgccgtcgcggcactgctgggcagcgtcctgccgtcgttcgtcatcatcctcgcaattgccctgatgttcgccgacatccgccacaatccggtcgtggacgcagccttcaagggcatgcgcccggctgtcgttgcgctgatcgtggtgccggttttttcgctcgcacgcggcatgcactggtcgatgttcttcgtcatcgcggcggcggccttcgccgtatggtatctgggctggtcgccgatctacatcctgatcgccgcggccgcgatcggcatttcatggacgctgctcatcactaaaaaggcaaaaaaatgatcttctggcaactcttcgcaagctacctcaaaatagggttcttcggcttcggcggcggatacgccatgctctccctgatccagaacgaagtggtcgtccagcacgcatggatgaccaacgccgaattcgccgacatcgtggccgtctcgcagatcacgcccggccccatcgccatcaactccgcgacctacgtcggctataccgtcggcgcacaggccggaaacgagtggtgcggcattctgggggcggcgctggcgacattcgccgtatgcctgccctcgctgacgctgatgctgctcatcacgcgcttcttcctgcggctcaagcaaaatccgctcgtcgaaggagccatgaaaggcatgcggcccgtggtgatcggcatgatcgcgtcggcggcgctgctgctgatgttcccccatagcaaagcccccgacgagcagaatttcatcgacggctggagctgggcgctgttcggcggcgtcttcatctcttcggtcaaaaaagtgaatcccattctgttgatcgccctctcggccgcggcgggaatcctgatctattacgtattctgaccccgtccctctcctataaaaacggccggagcgcatacgccccggccgatgttttcccaacagtcgccgatcacaccacggcgacgaccgccgcacccgccagcagcaggaacaggaagactccgagacacaacagccccagaacggctatgaacgtgccgatacagccccagcgctgatcgccgcccgacagcggatcggtcagcagggtgatgatcagaccgacgagcggcgtgaagatcaggctcagcaggaaagccagcccgaagccgatgcgccggcggctgccgatgatacccaccagaacagccagcaggcagccgctcaacaaaccgaacaacagagtcagaatagccataatcgaaatcttttagcggatgaaacggtaataggtccccaacggcagctgcttgcctgcgcggtcggtgaaacagagttcgccgtactgctcttcgagcggcgcgccgaaggcctgccgcacggcggtacgggccagcgtggacgaaaggcccatcgagtagaggttcaacacgagaaacgccccctgcggctccagcagctgcgcgcagcaggcgagcatctcgcagatattctcctccagaatccacttctcgccgttggcgccgcggccgtaggccgggggatcgaggatgatgccgttgtagcggctgccgcgccgcacttcgcgccggacgaatttgagcgcgtcttcgacgatccaccggatgccgtccagcccgctcagctccatattctcgcgcgaccacgtcacgacctgcttcaccgaatcgacatgggtcgtctccgccccggcggcacgcgccgcaaggctcgcgccgcccgtataggcgaaaaggttcagcacgcggggcgtaaccggttttcgcggcgcagtccggcccttcggcgccgctccggacagaacgccctcggatgcggttgtggccggagcgcccgcaggagcggttgtgtccggcatcgcatccggcgcctttccgcccgcaatccccatcgcagcggctccgcccgacgccagcgcccggcagttgtcgtagatgaaattccagttggcggcctgctcagggaagatgccgacgtgcttgaacgaggtgagtcccagccgcatgcgcagccgcatccccttataggcgtaatccaccgtccagcgcgagggcatttcgggaccgagacgccactcgccgcgctcctcgctgcgcgtatcgcgcagaaaggaggcatcggccgcacggcgccactcctcctcggagagcgtccgccgccagatagcctgcggttcgggacgccgcgtaacgtaacgcccgaagcgttcgagcttctcgaaatcgcccgtgtcgatcaattcgtaatccccgaaagcgggtgtcagctgttcttgcataaaaaatcttctttattttatcgtcggcctgagcaggaagcggaacgtatagtcgccgtaaggcacccggaaccgctcctccggcagttgtccccagctgtcgatacagcccagtccggactgccgcagatcgaagttcacgaacgtcgcgtcgcgcgccgtgagcgttcccgaatgctgctggggcgggaagttcgacacgtcgagatcggccgtcgcatagggcagcgccgatgccgagaaaggagcgtcggagaggatcgtcagccccgtgcccgaactgtcggccacggtccaccagcgcacgtcgctcttggtgcccgactcctgcggacgcacatattcgtcgtgatactggtcggcgacacgctgttcgtaaagccccagatcggccgacgagagccggtcggcatagttttcatgttcgccgcgaccgtagtagatcacgcggccgtaacgcgccggcatcgtgagcgtcatgccgtagcgcagcaggttgggaaccttggccgacttgccggcggtcatccgttccgtcacctccatttcccccgcgccgttgatccggtaggtcagcgccagcgtcgctttcacggctggaagctcgtaaagcgcttcgacgaccgccacgccgtccttcacaccggcgtcaaatttcgtgagtttcagttcgggattcttccagaccgcgagtttgcggtcgagctttgcgccgaggtcgttctcggtcggagcgcgccagaactgcggacgcagctcggcgccttcggccatcagtgcacggccatcgacgtcgtaggcgcagaggaagccgtcgcgcgagaagaacatctcccacgtctggcctgcaacccgcgtgccgcgctcccatgcagtcacctcgacgggacgttccgacgcagcaaggccgaacccggctttgcagtcgtactcacgcacgacgaactgctgctgcgccgccgtatggccgatgtccaacagcggccgtttgtttttcagtttgtaggccacgttcaccagcagctccttggcctgcgggcagaaatcggcggaggtgaagcccagcgcataggtgcgccgctgccggggcgcgacatcgagttcgccgatacgaccggccttcacgacccgaccgtcggcgaccagttcccacgtcagttcgtaatcgtccagccccacgaagaagttctcgttgtacacctccacgcgaccctgcgccggatcgagaagctcggtccagatattctgatactgccgcttcacctcgtaggcgtgcggatgccacgtgcggtcgggcgcgatgatgccgttgcagttgaacgaattgtcggtcgcgtcgtagttgttgaaatcgccgccgtagaggaacgacacgcggccgttcttttcgtagcgggcgagtccctgatcgacgaagtcccagatgaatccgccctgatacgacggatattggcgcaccagtttccaatagtggtccagaccgcccatcgagttgcccatggcatgcgcgtattcgcactggatcagcggtttggaggggttgttcttcaggtatttctcacactgcgcatagtcccagtacatcgggcagatgatatcggtaaacgcaccgtcccgatcgtacacggcgcgttcgtaatgcaccggacgcgacgcgtcgtaatccttgatccagcggtagcaggcctcgaagttaggccccatacccgcctcgttgcccatcgaccagacgatgaccgaggggtggttcttgtcgcgcagcaccatgcgctggttgcgctccatatgcgcctgcgcgaaggcgggcaccttggccagcgtctcttcgccgtagcccatgccgtgcgactcgacgttcgcttcgtccacgacataaatgccgtactcgtcgcagagttcgtaccactgcggatcgttgggatagtggctcgtacgcacggcgttgatgttcatctccttcatgatgcggatatcctcgatcatccgctcgcggctcaccacataacccccgatcgggtccatctcgtgacggtcggcgcccttgatcagcacgggctgtccgtttacgagcagctgggcattccggatctccaccgaacggaagcccacgggctgcgtcacggtttcggtcacgttccgcccgtcagacacgtcgatccggagcgtatagaggttaggcgcctcggccgaccacttcgcgggatcggcaacacggaagagacaccccgctttgccgcccgccggcatgatctgctgttcggccaccgcctcgcccgccgcatccagcagcgtcaggccgaccgatttcacgcgcggggtcgtctccacttcgacgtgcagctgggcgtccctataatcggcgtcgagcgtcggggtgatgcgcacgtctttcaggtgcgccttgtcgcgggccgtcagcgtcacgccgcgggcgatgcccgaaaagcgccagaagtcctgatcttcgaggtaggtgccgtccgaccagcggaacatctgcagggcgatcaagttttcgcccggcttcacgaatttcgtgacgtcgaattccgccgcaagcttgctgtcctcgctgtagccgacgaaacggccgttgatccagacatagacgttcgacgtcgccgagccgatcgagagaaaaatatccttgccgctccacgatgccggcacctcgaacgtatgccggtaggaaccgacatggttttcggcgtcgggcacgtgcggcggattgttctcgaaattgccgcgccacgcatagccgacattcacgtagagcgggtcgccgtaaccgttcagctcccacatccccggcacgggcatcgcgccccacgacgcatcgtcgtaatccacctgccagataccggagggacgctccgaagcgttgcgcacccagtggaatttccacacgccgtcgagcggcatgctctcgcccgccgcaaaggtcgagtgcatcggcagacggttgatttcattgacggcagggtcctgccattcgcggccggtctgggccgaagcggccaacgcgcccgaaagcgccgccgcaaggatcaagagagtctttttcatcggttatggttatggttttggtttcgcagtctctttacgggtgcagtccaccaagctcatttcgcagcggacgcaatcgaattccagccggtagcggttcgcgccgcgctccagccaaagatcgcccttcagccgcggccgctccttgaggcattcgccgatttcgcggcggatgcagtaggccgagcgcatcacccgacgcccggcggtcgtggccgcgaggtcgagcccccgctcgatttgccggacgccgtggtcgcggtaaaacgcttcggcaagacggttggtgacattctcctcggccgaaagcgtctccgacggatactccgccgcgccctcaggcagaatccggtgctcgacgccccgcgccagccgggcctgcagcagggcggcaagcccttcgcgacgcagctgcgacgccagcgacgccggaacgaaccattcggctccctgcacctcggccgagcgcaccgcaaaaatcgtatcgccgcttttcatggcctgcgtccgcagggcggcggcgttcgcttcggcattattcgcaggttccaaagcgatgcggcgttcggcgacagccgccaccccttcgcagtcggtatagcggaacgtcaccccctccgccgacgccgtcaccacggccgcggccggaatcacgcgccgcgtacggctccgttcgagcagctggttgaagcggtggtcgtaattgcggtagacctcgcatcccggagcgatcccttccatacggttgggcgtcacgcagtcgccgtcggcagcattgacattggttccgaccagtccgcgcggcgtcaggaagcagatgccgtcgccggcggccagcgtatgcacccggtcgagccggaaacgggtcctttcgacacgcgtcacgcggcccgcatattcgccgacggccttcggcgtgtcgaacgacgccacgccagcacgtttgcccgcaaagaagtattcagactccccgcgggtgaaactcttggccgtatcgggcgtgaagtccgcgacgctttcaccggccgaagcacgccgcaggtgcggccgcacggccagcgcatcgtccaccgcgcggcggtaataggccaccgtattgcggatataattgatgtctttgagacgcccctctattttcagcgacctgacgccggcatccagcagctcgccgacgtgtgccgaaagattcaggtcgcggaccgagagcaggtgttttccggccagataggtgcgtccgcagccgtcggtcagatcgtaggtcaggcggcacggctggctgcatgcgccgcggttgccgctccgctcggacatcgaccgcgacagaaaacagcggccgctgtaacccacgcagatggccccgtggacgaaacactccacttcggcgttcgtcgcggcgcatatcgcccgtatctcgtcgagcgacagcgcccgttcgagaatcacgcgggcaaaaccgcattcgcctaagaaacgcgcctgttcgggcgtcatgttgcacacctgcgtcgaggcgtgcagctcgaccggaagatccatccgccgcagagccatgtcctgcacgatgagcgcatcgaccccggccgcgatcagctcgcgggcctgccgctcggcggtctccagttcgtcgtcgtaaatcagggtattgagcgtggcatgcacccgcacgccgtaacggtgggcatactccgcgacgcgggcgatctgctccgcgctgttgcccgccgcatggcgcgccccgaacttcgcaccgccgatatagacggcgtcggcgccgtaatccacggcagcgacggccgactgcaaatctctggcgggagcgagtagttcgacgaagttcatgctttattttttgcaaaaataacaaattccccgacaaaaaccggagccgaagccgaaaaaacacaagacaaagaattgataaccgttcttgaaaaatatcacaaaatcacatatcaaaaacctactatcaatagcaatctaggaaacctcacttccttaattcaagcattcattcaattaaaaaacttccacatactctttaactttcaaaaaagaagaagccaaattctttacattactcgctaaaaaagggactgtcgatgctttcttacatccatcttccatatagtaagctaaataaaaagaacgatgtactttcttaaaattatcatataaattatcaacaacaacaccaaattcaggataatcaagttgagctatcataataatctcatgtacattactttcaatctgcgaacggcaatcatccagatatctcatccaattaaaatcatctccatgaaaatgatatgctaaagagggagatatggacaaatccaaagtttggcaagctttttcaatatccacatctaatggaattaccgagctatttttcgaagtaatattttgaaacagatttactcctacctccaataaggcactgacatatttgcgtaaaaatatgctccgatatttacgctctgaataccgagataaaactacagtcactccatagacaatcgttgctgcaacaattgaccaacatatattcgtcaaccaatccactgaaataataatccccacacagaaagcaatcgcagctacccccaataaccagaaactctcttttccaagtaacatcatatattttcgcataaacttctattttatgtataaaatcatcttttcactactttggtcttcacgcatcacacttccatcctcattataaagagtcgaaacagtccttccgtacctacaatcgcctgaatcagaataagtatacacactatgatttacaaaacttaaatatcttttaccactaggataacctttctgatactgcactgattttgcctctaccattctccctttattgtcataaacataatcccaacgattactaatctgaccattttcatcacaaatttcataataagccatattctgagattcccaagaacactcacaatttgctgaagacgtggaattaccactaccgcaatcttgttcaaatttattttcatctccaccacaagcttgaatggtgatacttacgagtgcccccaatacaaacgacactattaccatacttaatgttctatccatagtattctttattatttacatgccagccccatagcaaattcagtttgagtccttaaaatatataaaaaacgtgggacaaaacttccattgatcattgaggtcttcgacaaccttggctatcaacgaagtaaagcccacgtcgtgaaacgtgagcgtcttcgcttttctagtagccgtttgaaagtgtcgaagttccaatgactagtaaaagctaacgctttttatatgtaatcacaatttagatcagccgtttatgtcataagcaatgattttattcgttatatctgcaaatataaggattttcaccagcattgtcaacctaaataacctttttcctcgataagaagatacaaattgccgctatttttataaatttgcggtttgtaatacgaatactcaaaaatcaacagatagtatgcttacgctaaagcaaatccgcgatgacaaagaggccgcgatccgcaaactggccaaaaagggcgtggacgccgcacccgtcatcgaaaagatcgaaacgctggacgaccgccgcaaggcaattcaggtagaattggacaatacgctggccgcgcagaacaaagccgccaaggagatcggcgcgctgatgggtcagggccgccgcgaagaggccgaggagcgcaaacgcttcgtcgccgacctcaaggagaaatcgaaccgcctgcaggccgaatcgcgcgaagtgcaggaggagctgcaggccgcgatcgtcacgctgcccaacttccccgccgagatcgtcccggagggcaaaaccgcagaggacaacctcgtcgtaaaactcgtcgaaagctacaccgaactgcccgaaaacccgctgccccactgggagctggcccgcaaatacgacatcatcgacttcgatctgggcgtgaagctcacgggcgccggattccccgtctacaagggcaagggcgcacgcctgcagcgggcgctgatcaactacttcctcgactgcaacaccaaagccggctatctcgaagtcgagccgccgatcatggtcaacgaggcttcgggcttcggtacgggacaactccccgacaaggaggggcagatgtaccacgccacggccgataacttctacctgatccccacggccgaagttcccgtcacgaacatctaccgcgacgtgatcctcgacgaaaaggatttccccgtaaaaatgaccgcctacaccccctgcttccgccgcgaagccggttcctacggcaaggacgtgcgcggcctgaaccgcctgcaccagttcgacaaggtcgagatcgtgcagctgagcctgccccagaactcgtacgaagcgctggacggcatggtggcgcatgtcgagtcgatcgtcaagtcgctcggcctgccctaccgcatcctgcgtctgtgcggcggcgacatgtcgttcacttcggcgctcacctacgacttcgaggtctactccgaagcgcagaaacgctggctggaggtttcctccgtctcgaacttcgaatcgttccaagccaaccgtctcaagctccgctacaaggacgccgacaagaaaacccagctggcgcacacgctcaacggctcgtcgctggccctgccgcgcatcgtcgccgccctgctcgaaaacttccagacccccgaaggcatccgcattcccgaagcgctgattccctatacgggttttgatattatcaaataagtttctatatttgtcattacatacacacattaacaaataaatttttcaaaaatggcttacaaaatcaccgactcctgcgttgcctgcggtacctgcatcggcgaatgtccggtagaggctatctcggctggcgatatctatgtaatcgaccccaacacctgcatcgactgcggcacctgcgcaggcgtttgccccagcgaggcgatcattccggaataacgcacggttacaacatggaacaacacgcccgaagcattatgcttcgggcgtgttgtttaggcgttgggctgagaaagttattcaatcggttttcccggaataacaattcctccagcttcttccaaagaatagcatctatctctcggaatctctattttccaataatctccgggaagatccggattaggccccataaaaatgccatccattggagttgtcgtagcaggcataataacttttccagactctccagccgcctgacggatttctttccaatcaacgacctcaaaagcaattccattagaccttatgcccacctctttatacttgaaatacactctatatggcaaagaagcataaacatcttgttgctgatcgcacaaattaatatgattcagatacattacacctagtttagaaataccttttctgaacccataattcatctccggtctgaaaaacacctccacacaataatgtggaccgaccttcataacatcggaagagttagcccatgtcaagccgggtttaatcgcatacgcacccggctggtcgaaacgaatcaaatagttccctgctccgtcgttattgataatcgtacactgcggatcattaaaaaccgattccgtgatttccagattgggatcaggataatcaggatcttcaaaattgacactgaaattataaactttaccgagtgctacagaactcggaccttcgatgcttgccacaggcgacgccacccgacaagtaatggttgcctgttggagcataatcggccccgacgggttcgcaagatcacgataattccgtgttgccaatatctgataaacaccgcattttgtaaaacgtagtttcagcgatttatcggtccgtgaaatttgatcgatgccgccgtctatcgtagtaaagaacgacacgtttgtacttatcacttctatacccgcatcaactcctgacgtcacgaggttaaacgtataatctatatcctttccataatactcatcgccaattcctcttcccgcaggattactgacaatgccgatcttagcaatgcctgcgcgcgtctgcggattatccggcgcaaggtcttcggatacttcgaggatttcctgcgagcaggaacccgcacacattaccgccaatgcaccgaatagcggcagtacgaaatttgggaacaagtaggattttttcatagcttaaattatttaagtgggtgaataataaaaagccgcaggaaaaatatctgaattattcaaatacacaataaatcaggcgtattatttcattttccgatgaaaattttcacaaaccgtctccatatgtccgaagcacatatatatttccaataaaaaaactgcggtccaaattggaccgcagttcgatatgattattcaaactcttacaacctattcaagagttggaaatccgtgttattatccaagttatttgaaatctgctttttcaatccagcattttcaaatttcccactgttgccaatgacagtccccgacgcagcaggacgatcgaatacaagcgagctcggcattgctacttggctttcgaataccacgccattctgcttaactgaagttgacagaactgtacatccagaaagtacactcgacagtttacttgcatgcagaattgtagcagcagacttcgaagcagctacagaagcacctgaactcttccttgtcattgtataaggacctatcggataatccttatcggtatatccttcagctgccttttgccaataaatatcttgtccaagaacccagaagaagtccatcgaactggtagtaaaattacccattccctcgacacttccttgatatagagtaatcgttgctgagtttttatctgcattaagctttccggtaaatccgggataaccaccgttaataatataatattttccctgcaaaagtgcccgtcctgtaagagtcaggacacttccatcctccggatcggtatataaactctggccttccaatatctcaaaatttccggtagcactatcgaatttagccgacggaagaatctgcgactggtcacgaatcgtagtaatgccccatccttgtaatttataggatgaattagcaaccccctgaatgaacgtaacgtcgaaagaaagcggcgcagcattcacctcagacgaagtgctggttaaagtccacgtaccgagccatgccttgtaagcatcggaagcctccccaccaccttcagtagtggctgcgacatgctttgtagtcgatttaccagccgaatccgtaacttttaaaatacaagtataggaagtagcgggatctaatccactaaaggttactccaattccgggattctgaacaagcccgtccaaccatccgtctttagtagacatatctgttccgttctgagtaactatagcatcataagaagctccctgagcaagtactttttcaacatccgaagttaaaaatactccataatacgcacctgttgcagtcggagcataggctcccatataaaccttagtgtctgtatttgcaccattagcatctccagcacgaagtgtcaaagtcagttccggaccatcgcccgtttcaccgtcatctgcaagtgtggtaaacctctctttggtcactgccgttgttccagcagttccgttacatccgaaagcgacgacacaatattccgtttcaggatcaaaaggaatatgttgctctatcagctccttagaatagccatcaggacccgtagacaaatatttggtaacatcaccgtcattcgcgccaataatagctgcaatcaactgattgtcatcaggtatctgatcgacaacggaagccggataaatatcaaaataataggtatcggaattattagacggagtaatgttaatatcagcgcctttcgctccgatattcgttacagcgatagtaaaagtcaaatcgccgccctgagcagcatcagtagttgccgaagctgaatcgaccgttgtttttccattggcactcgtaacggaaacaatcgccgtaaccgccgtagcagcaggcacaccgcggcaaggcagatcataaccttcagcgctgtttatcttctcaacctgctcagtcttaagtgtcggatcagtcgtaactccggccaaaatctcagcaagcgtttttccctcggcaagcgccttatcgacagcagatttcataaggaatgccgcttttgccgaaactatatccgaggacttgatatggcaggtgacatacgaagaagtgttcgcaccgctggcgtcgcccgctctcatggaaagggtcaattcaggagcaggctccggagcatcgtccgtcttgaacgcctctttcaccagatcggaggtgaagcggccgtcggtcagcatgccgagcgcaacggcgtagtagtcggtgccggccgtcagatcggtgattttctgcggtgcgcttcccttgacgagggccgttgcgagatactcgctgagcggcagcaccttcttatccgcaatagctttcagattgtcgagaatatgctgggcataggccgcgtcggactcgaacgtgtcgaactcggccttctttacagccgcataatagtaggtagcttggtcgttgctgggagttaccgttacggtagcttcggtctgggctacatccgaaacagcgacactaaacgaataagagggggggggtccgactttgtcgtcgtcgtcattacagcctgaggtgacaaacagaagagtcacggctgccaataacatgcgcaagtaagatttgagcgtcataggcttaaaattaaattaataaaattgacaagatataacaattcgtccggcaaggaacgctaaaaattatattacgttagcaaatataagtatttatattcgtaattgtatcattcagatacaagaaaaacggcatgccggatcaggtttcgcaggccgtttgattacaatattgagaaatccgggggcatttgattacaaaatccaatcatcgacggcaatattcagtaatatttccgaaggaaaaaatatttttcagattttttcaaaaaatttattttcgacgcatgccggacctcggcgcgggccggacattccgggatcggcttcccgaaagccgatttccacagacaaaaaagctgcggcgcatatgcgccgcagctcgattataggaatacggaagaggctatcttctgggagtccggactctgtttttcggagaccgggccgcagccgccgtcttcaaggagacctcttcagcctgcttcaagcctgcatttatgccgacaaggcatttgatctgagcgggtttgccaccggataacgcctctgcgttgccggacatttccgcaccccggaccatcttttcggacagggccgaggtccgctcccggcgcagatttatcaactgcgaagcagcggcctgcggcatgttcggctcttcgagcggccggaaaaccttcgggacatcgagtccgggcagcagcgaactgcacaacacgggtagtttaacgcctgcggccgcggctttcgacgctcccgacagttcggagatgggcgaggccccggacttggtgaagcgcactcccagccggaagatttcaccgacattgcccgatgcgtcttcggcgacggcgaggaaggtgcactgggtatcccacgagcaggtgaaattaatcttcgcggcatccttcacgccctgagacttcagcgcgttgatgatcgtggcttcggaaaccgctccggggtccgtataatcgccggtataaagggctacgtaccaatgcgcggcatccgccgaagaggtaaccgttgcgggaatatacgcttttcccgacgcattggatgatactccggctgcaacgatctcgtcgccgtcgaagtacttgtcgtaggccgcctccaccgtcgcggaaccggctacggcttcgagcgtcgtgaatatttcgccgacggcaggcgtgccgacaacgttgccactcaggtccacacatgcggcataaggcctgtaggccgttttggaagagagtttgccgtacgcataggaagcgcccgaataccaagcgcccagcccggcgataacctgcacgggagtcagatttccgtattgcgccgtaccgtagagcgcaaacatgtccgttacgtgcgacacaagcgcttcggcgtttccgcccagctgggtatagctggcatcggaaatcacgtcccaaatataggtaacgggctctttggtcgtctccacggttaccgtcgcaccgccggaggtgatgtcttcgactttgaaggtgaatccggtacccgcggcgtcaggcccggcgcccgccgtgaacttggctttcgtgacgcccgtcgtcgccgaagcgccgtcgtatccgaacgcaacgagataatattcggcgccgggcatcatggcgagttccccaccgaaatccgtaggtacggtcgcataatcgccggtcaccagaagccacgagataatctggccgtacttctgctcgacggaagcgatgatctcggcatcggacatgcccttgatttcatcggccagcatgaaatcgagcatatagggatcttcgtcgttggaggccgtaatcgcagccgtcacaccgccgggaatcggctccgccgaggtgtcgatagcgatcgacagcgtcagatcggaggtcgccgctgtctccgttgtaaactcatggcgcgtaacggccgtcgtcgccgccgtattgtacccgaaggcaagcacgtaataggaggtcccggccgtcagggaggtcggtttgtaaccgtcttcgccttggctcagcattccggcgatgccgccgtatttcgcataggtttcatcgagcgccgcgatcagcgaagcgtcatcggcaaaattctcgtcgatcagttttttgggctggatatcgaagaaataggtctcggtatcgttcgagggcgtcacggtcaccatggccgaggtggctttcagctccgtcaccgcaatggagaaagtgaggtccgacggcggcacgtcaccggaggtcgtagagacgttttcgctcttcaccgtggagcgtccgccggccgaaacgactttgaaaatcaccgtataatccgtcgaaggcacgatcacgtcgcccgccagcgtcaggccgagacctcccttcgcattcagggcggcaatatcctcgctcttgacatcctgaccgttggcatcggcgatattttcgagcgaagcgccctgcccgataaaatcatccacgatttgcttcggaagacacgccatcttggcggatacggcggcctccgacacggcagtgcagtagatcatcgtcgaggtattgtttccgtcggcatcgccggcgcgggccgagaaggccagatcaggcgcttcgcccgtaggcgccgtcgtcgagaatttgtacatctgcagctccgaggtaggttcctccttctcggcatcgtagccgatggcgtagacatagtattcggttccgggcttcagagcgagcatcccttcgaacatctccgcagggtaaccgtccggtccctgcgtcagataggcgggaatgatcgcgtccaaaacgtcggcgagaatctcgtcctcggacattccctcgtaggccgccgccgcaatcacgtcgaaataatagggagcttcgtcgtcggagggaatgacggcgatatcggcggccgtcatggtgatattctccaccttgaattcgaaggtcagctccgtcggttcgggggtcgccgtcgtgaacggcgtcttcttcaaatcggacgtaacccggccctccggcgtaatgccgtatacataggcatagtagtcggtcgaaggctccagcgtgacgaatttgatcggttcgcttcccgtggcgattacggtttccagataggctttaaaggtcagctgctttttttcggcctgagccttcagataatcgatatcgtcgtccagataagcctcgtcggatcccaatttatcgaaatcggcctttttgacgacagagcaataataggtagccagcgcatcgctgggagttacggtaaccacggcgtcggcaaccctgatatccgaaacggctatatcaaaggtgtacttttccgagggggggggaatttcttcgtccgaatctttgcaaccgaccgccacgaacagaagagcaatggcagccgataacacacgcatgtaggatctaagtgtcataggcttaaattttaattagtaaacagacagaatcgacataaccattcttccggcaagggttttacagaatcgctacgcaggtaaagataggcatttatccctgcggttgtaccggcaggctccggcacgaaacgtccgccgaatccatccggcggacgttttggttacaactcggcagagttatcccgttatcggttacgaaccggaaccgattgcgaagatatgtagcaaatatgcaggtgaaaaaaattccgaataaaaattaaaatccactcaaaaacagggagtttcactccgcatagagcagatacggccggcgctggcggcggaaacggctgagatcctcctgccagcacgcgcggatttccgcttccgaagccccggcgagaatcatctcgcggacatagcccacgccgatgagtttttcgaacatcggagtgaagaaccgctcgcccaagcccagattgcgataagcctcgatcacatagcgcagcgtcagccccacctgccgcgcctcgtcgagcggcattcggctcaggtcggcgccgtggcagagccggccctccagcggaggatgcttggccccggccgtcggacggggcgtaaacgagaatccataccccttcatatcgggatggccgtagatttcgaacggcttgtcggtcccgcgccccagactgacgaccgtcccttcgaaaagacagagcgacggatagaggtagacggcccgctgcgtcggcagattgggcgacggcgcgaccggaagcccgtaaggtgtcgcatgggtgtaattgcggcagcagactacatccagcctgcatttccggctccacccctcgccgacggccatccgggcgatctcacccatcgtaagcccgtgcagcacgggaatcgacaaggctccgacgcccgacttgtacttcatgtcgagcaccggcccgtcgatcagatgcccgttgggattgggacggtcgagcacgacgaccgtacggccgaattcggcgcaggcgtccatcatgcggagcatcgttatataataggtgtagaaccgcagtccgacgtcctgcatatcgaccaccagcacatcgaacgactgcatcgcctcgtccgaggggcgtttggtattgccgtcgtagagcgaccggatcgggattcccgtccgctcgtccaccgagtttccgacatgctcgcccgcatcggccgttccccggaatccgtgttcgggcgaaaagatccccgtcacattgaatccgcggccgtgcagcagatcgaccagatggatcgtcccgtcggcggaagcccccggcaaacgagccggccgattcccggccctgtccggcaaaaccgtcgcgtcgcctgcggatacttccggcagtcgttccgcctctgccgcatatttcccctgcgccggttcgtagaaacgcgcgacggcggtatggttcgccagcacggccacgcgcaggcccttcagtttcggaaaataggccgcagtgtcggtcatgccgaccagcaccggagcatgcggaagcggtgcgccgcaggccgatccgggctgcgccccctgtgccgcagcgcgcggcgcgacggccaaggccgcaagcgtcaggaaaacgagtagtctcttcatcttacaaagatagcgatcttttcgtacggcgaaaccccggatcaggcttcggcgccgtactccatcaggtaagccttgatgaattcgtccagccccccgtccatgacggcttcgacagccgaggtctgcacgcccgtccggtgatccttgacgcggcggtcgtcgaagacgtaggaacggatctgcgaaccccattcgatcttctttttcgacgcctccaaagcctgctgcgtggccatgcgtttgtccagctcgcgctggtagagcttcgatttgaggatacgcatggcgttctcgcggttcatcagctgcgagcgggtctccatgttctcgatcaggaactccaccgcttcgcccgtatcggcgtccttgccgtgataacgcaggcgcacggcggtttcgaccttattgacgttctgaccgcccgcaccgctggctcggaacgtatcccactctatgtccgagggattcaccgtcacctcgatcgtatcgtccacggcgggcgacacgaaaaccgacgcgaaagtcgtctgccgcttgttgttggcgttgaagggcgaaaggcgcaccatgcggtgcacgccgttctcgctcttgaggtagccgtacgcatactcgccttcgaactccagcgtgcaggacttcacccccacctcgtcgccggcctgatagtcgagcaccttgaccttgtagccgtgcgcctcgccccagcgggtatacatgcgcagcagcatcgacgcccagtcgagcgcttcggtgccgccggccccggcgttgatgtcgagaatcgcccccagcttgtcctcgtcgcggcgcagcatgttgcgcatttcgagtttctcgatgcgctccagcgtctgcgcataatgggcgtccatctcctgctcgctcaccacgccctccttcacgaattcgggcatcagcgcaagatcctcgacgtccttcgcaacggcgtcgtaatcgtccacccacgccttgatggccgctacgcggcgcagctgttcgcgcgcctgatccgggttgtcccagaaatccggcacttgggtcttctcctcttcgttgagcaggtcgatgcgcttctgttcgatgttcagacagcgctccagcgcaccgctgcgctgttccaaatcctttatctgatctgcaagtatcataggcaatcaattaacaaaaaaaatgcggccactcagggcttcacgcccagtttgcgttccacgaattccagcacgaaaccggtcgtgccgtcgattcccagcaccgacgaatcgatgcagagatcataggtctcggccattccccacgtgccgctgctgtaataattgtagtaggccgcgcgccgggcgtcggtgcggtccatcaggctctccgcctctccgggcgcgatgccgtgcaggcggcagagccgctcgatacgttcggcacggccggccgcgatgaaaatattcacggtgcgcggatgatcgcgcagaatatagtcggcgcagcggcccacgaaaacgcacgattcgcgcgaagcgaggtcgcggatcacgtcgctttggattttgaacagcgcatcgctgctcagcacgttgctccccgaatattcgcttccgacgaacggcgaacgcagatagccgatgaaggtcgcgaacaggttgcgcgactccttttcgtcggctttctcgaaaatttcggggcagatgccgctctgctcggcggccagattgatcagctgcttgtcgtaaacgccgattccgagtctcgccgccacggcctcgccgacggccttgccgccgcttccgagctgccgcccgatattgatgacgaatttatctttcatagtcgcggattattcggggttgttcgttgccggggccgcatccatcttggcccggaatttacgcagctggtaggccagcatgcagaaggccacaaccgacgccagcaggtctgagagcggcatcgagcaccacacgccccagctgccgtcccaacgggtatagacgtcgaagatgtgcggcaggaagatcagccccggcatcaggaaaagcagctggcgcgaaagcgacaggaaaatcgccttgccggccatgccgatgctcatgaagaagttggtggccaccatctggaacccgatgatcgggaagcagatgaagacgatgcgcatgccctcaacggacagccggatcagttcgggatcgttcgtgaaggcagacaccgccagccgcgggaccagctcgcccatcaggaatccggccatcgtgacgcacgtggcgccgatgatcgtcagcttcagcacgcgcagcacgcgctcgtactgccgggcgccgaaattataccccgcgatgggctgcatgccctgattgatgcccatgacgatcatcacgaagaagaacgccagccggttcacgatgccgtaggcgccgatcatcaggtcgccgccgtattgtttcagccccttgttgatcaggatcacgatgaagcaggccgcgaggttcatcaggaagggcgacatgccgatggccagaatatcgcgcacgatcttgcggcgcaggcggtagatgccgggcctgaaatggagcagttcgctcttatccgaaaggatatggaactgccagacgagcgcgatgacctgtgccagtatcgtggcgacggccgcgccgcggatgccccacccgaaaccgtaaatgaacagcgggtcgagcgcagcgttgatcaccaccgtatagatcgtagcgtacatcgacttgcgcgggtggcccgaagctctcagcacggagttcagtcccaaatacatatgcgtgatgacgtttcccaagaggataatcgtcatgtagtcgcgcgcatagcctatcgtcgcgtcgctggctccgaagaaatagaggatcgggtcgagaaacaacagcgtcaccagtccgaacgaaagaccgataatcaggttcagcaccaccacgttgcccagaatgttctgggccgtttcatagtcgcgctggcccagacgcatcgacaccagcgtcgcggcgcccacgcccaccagcgaaccgaacgccgcggcgaggttcatcagcgggaaggtcagcgccagccccgaaatggccagcggccccacgccgtggccgatgaagatgctgtcgaccatgttgtagagcgaagcggccgtcatggcgatgaccgccggcacggcatattgtacgagcagtttgcggatacgctccgttccgagttccgcagccgctccctttattgttacagacataatttcctgttcatattcctgtagagtgccgatttcccggaatcacctcccggacatgcagcccgacgccgcccggcacggcggacatcctgcataccgcccggacacaacctgacaactccccgggcaccaccgtccccggacactgccggggcggcaaaaaccgtgcaccgcactccggcgtccgttccggcgggcggcgcccgaaaatcgggagacagctattccagctcccagtcgctgccgtccttgcggtccttgacgcggattccggcggcggccagcccgtcgcggatacggtcggaagcggcccagtccttcgcggcgcgagccttcagacgttcatcgagcagcatctcgaccagcggcgtcacgtagtcgcggcccgaagccgagccggcggccttctcgtcgcgcaggccgagaatgtcgaacgcatagcggcgaacggtcgtcttcagtgtttcgaggtcggcggccgtgatggtctgccggccctcagcaagctggttgatgacgcgcacccagtcgaacagcgccgaaatgaccatcggcgaattcaggtcgtcgtccatcgccgcgcggcagcgtccctccagttcggccggatcgaccgtcgagacgtcggcgggtttgatcctgccgagcgcctcgacgcccttcatcaggcggtcgagtcccttctcggcggcctgcagcgccccgttcgagaagtcgagcgtcgagcggtactgcgcctgcagcacgaagaaacggatcgtcatcggcgaataggcctgcgccagcagtttgtggctgccggtgaaaagctcttcgagggtgatgaagttgcccagcgacttgcccatcttctggccgttgatcgtaatcatgttgttgtgcacccagtaacgggccgaatcgtggcccagcgccgccgtggactgcgcgatctcgcattcgtggtgcgggaacatcaggtccatgccgccgccgtggatgtcgaaacgctcgcccagatagcgggtgctcatggccgagcactccatatgccagccggggaatccctcgctccacggcgaaggccagcgcatgatatgttcgggcgacgccttcttccacaacgcgaagtcgtacgaatggcgcttgtcgctctgaccgtccagctcgcgggtgttggcgacgatatcgtcgagattgcggcccgaaagccggccgtaattgtatttccggttgtacttctccacgtcgaagtagaccgagccgttcgactcgtaggcgaacccgtcagccagaatcttcttcacgaactcgatctgctcgatgatatgtcccgacgcatagggttcgatcgagggcgtctcgacgttcagggcctccatcgcacggtggtaacgctccgtgtagtagtgggccacctccatcggctccagctgttcgagccgggccttcttggcgattttgtcctctccctcgtcggcgtcgtgctccagatgtcccacgtccgtgatgttgcgcacgtaacgcaccttgtagccgctggccttgaggtagcggaacagcaggtcgaacgtcacggccggacgggcgtggcccagatgcgggtcgccgtagaccgtagggccgcagacatacatgcccacgcggccgggagtcaaaggctcgaactcctccttgcggcgggtgagcgtattgtaaagtacgagtttcgattccataattatccgaaaaatttaccgcaaaaataagaaatttaatcgacatgcgccagaatcgcggaattaatcgtacctttgcggcgacaataatagcacgcgccggtctgacgccacccgtttttccctaccgtatattatgcgacaatacgaattatccggctcccagaaccggaataaaaccgatatgcaatgacattcaaggaactgaacctcatagaacccatcatgcacgccgtagccgagaagggctacgtcacccccacgcccattcaggagcaggccattccgcccgcactcgaaggacgcgacctgatgggctgcgcccagacaggaacgggcaagacggcggccttcacgctgccgatcctgcagctgctctcggcccggccccgcaccaaaggacgccgccccatcaaggcgctggtgctcacgcccacgcgcgaactggcgatccagatcgacgagtgctgccgcgactatgcccgctacaccgacctgcgccactgcgtgatcttcggcggtgtcaaccagcgtccgcaggtggacgccctgcagcgcggcatcgacctgctggtcgccacgccgggccgcctgctcgacctgatcggacagggatacgtctcgctctccgacatccgcttcttcgtgctcgacgaagccgaccggatgctcgacatgggtttcatccacgacatcaaacggatacttccgctgctgcccaaagagcggcagacgctcttcttttcggcgacgatgccctcggacatcgtcacgctggccaattcgatgctccacgacccggtgcacgtcaccgtcactcctccggcgtcggtcgtcgagacgatcagccaaagcgtcatgttcgccgagaaggccgagaaaaaagacctgctcatcagcctgctgcgcgaacggtccgaaggctcggtgctggttttctcgcgcaccaagcacggcgcggaccgcatcgcccgcatcctcaccaaagcgggcatcgaggggcgcgccatccatggcgacaagtcgcagggggcccgcgaacgggccatgaacgatttccgggcgggccgctgccgcgtactgatcgccaccgacatcgccgcgcgggggatcgacatcagcgaactgccgctggtcatcaattacgacctgccggaagtggccgaaacctatgtacaccgcatcggacgcacgggacgcgccgggcacgacggcacggcgatagccttttgctcggaagacgaacgcccgctgctgaaagacatccagaaactgaccggacttgtcctcgatcccgattccggacgcctcacgccgggcatgcagaccgacacgaaatccccgcggaaacaggaatcctcccaacggagtgcaccgaagcaggccgcgcagggcggcgacggccggacgccggccggacaaagcggagatgcaaaagggccgcgccgacgcaggcgaaacgccccgaaacgggaaggacaggcccagagcgcacacgcgccgcaaccgcaaaacggcggaggacaagcgtccgaaaaccgcgaaccgggccgccgcaggccgcaccgccgcagacgcagcgaccggaaatccgaagggcagcgtccctgaaaaggggaagcgtcccggagcggggaagcgtccctgaaaaggaaacgccgaaaacagaaaccgggccggacaaccggcccttcatgtcatccggaggagtgcgccgaaagcaaccctccgcggatcagaaatccaataacttataccgggtccggacttcggacatcgccatcggctcctcgtaatgccaccactcgcggcggtagggcaccagccccgcttcgcgcatcacgcttccgagcagctggcggttgcggcaggcttcggccgaaatgcgtccctcggccgccagcgcgggttcattgcccgtgtgggcctcgtcgccgaagaaatcgaccggagttcccatatcgaccggagcgccggtctcgtcgagcagcgtcacatcgaccgcaacgccgtagttatgacgtccgccgcgcgttccgtcggctacgtaaacctgattcggcgtacctttgaccaattcgtacatctgccgctgcacgctgaccggacgcgcggcgtcgcacaccaagagccgccatccgggacgacgctcccgcagcagccgctgcgccgcagccaccttgcgcgcgaaatgcggaagcaggtaggcggtttccagatcgccgtagacgtcgcggcgcatgaaattatccggggccgagtacatcagcttcacccgcagcgtcgaatccacggccagcacatccaccagccccgcccggcgcatcttggcgtcgaagccctcttgggcctgcacgccccagcaaatcataaccgctgcaaacaccatccaaactcttctcataacaacatctccattttccagctcaaagataatcaattatctgcaaatcaaaagacaccgccgggcgcacggcaggccggaccgtccggatcaaagcccggctccgggaaccgccgcaaacggcgtgcgcacgccgttcccaaacaaatgaacggcagccccgaagatagcgccgtccatccgacacacgcatatcgactattccgtcagaaccgaaaattccgcgatgccgggacggtcgcccgcagcgagcgacagcgcctcgaaccggacggtacgcccgcgcagcggctcgaattccacgacctgctccaccggattgttgacgatattcgagaattcgccctccgccgccgtacggccgtcgaccgacacgcgatagcgggtcaccacgccgctcgcccagcgactttggtcgggcgtgtaggcaaatcccctgaaagtccgctcctcccccgtatcggcggagaaccccgcaacgcccgcgggcagatagacgacagtcgagacatcgccgtcgaaaagcccgacggcctcttcgtccggaagctccttcacgcgaaacgccccacagggaatatcgaacccgcgcgaagccacggcgctcatacgaccgtcctccgggtcccggacaagcgccttgacaacgccccggcccgtcatcggaaaaggtttcgcgtacagctccgaagaaggccccggctccgtcccgtccagcgtatagcggatctccgcctgcgtatcgcccgcagcgagcgtcacctcgcccgcaccgttgcgcacgatgcgcggctcttcgagcagcacgggcgcatcgtaggctcccacattggagatgcagagcggaccgcgggcctgcccgaaacggacgcggagcgccggagtcgtgacccctgcgaaacgaatgatccgcttgtatccgatcgtcgtcatttcctccgcggtttcgacgggccgccacgtatcgccgtcgagccattcgacggcaaagcgtccgacgcgctgtccgagcggaatatattcctgaagcaaaatgcggttcacacggcgcggccgctcaaactgcagcgagagcgtcgccgccgtcacgccgtcgtcggtagcccagtaagtatcggccctgccgtcgacggctttcgccgcggagaaccggcgcgccccgccccgcacgttgtcggccgtcgcttgggcttcgccgaaaaggtcgtgcgcgaactccgcatcgagcgcacggcgccactccatgatacgcgcggaatccgcaggggcgatgcggccggagcgatcgaccggaaaattgagcagcagattggcgttgcgccccacgctttcataatagatgtcgatcagccgcgagagacttttgagctggtggtcttcccgcggatgatagaaccagcccggacgtatcgagacgtcgcactcgcccggcagccatgtatcgccgtcggactcgccgcaggtgaaatcattgagccgttcatcgccgcggccctttaccatgctccaattcgtctgtccggcccggccctcttcgttgcctatccagcggatgtcggcgcacgtgccgccgaaaatcaccgctccgggctgcagttcgttgatcgtccggcgcgcccgctcgtagccgtaataggtcttggcgtcgatgctgcgcttctcgtccgcaccgccgtaccagccgtcgccgccgttcgcgccgtcgaaccagtattcgaaaagcggcccgtaaccggtgagcagttcgcgcatctggttgtggaaataagcgacatactcctcccgcccgtattccggatggttgcggtcccaaggcgaaagatagatgccgaacttgagtccgtgcctgcggcaggcatcggacagctcccgcaccaaatcccccttgccgccgcgccacggggagttcttcacgctgtactcggtataggccgaaggccagagacagaacccgtcgtggtgcttggccgtgagcatcacgcctttcattccggcggcccggaacgtccgcacccactggtcgcaatccagatccgcagggtcgaacgtcgaagccggagtatcgccgtacccccattccatgtcgttgaacgtattgagcccgtaatggacgaaggcgtaggtttccagctgctgccaagcgagctgacgggcattcggcaccggaaaaagcggcgcgggagcttcgacgcggccgcatgcggccgcgaagagcagaaaaacggagagcgttcttttcatggacggacaattattcgttaaaattaaacaaaatcggaaacataacgaaaaatcaggcggcaaaaacaaccgaccgcattcgccgcacggcggccctgccgcgaccggggaatgacgaccggcgtccgcccgcgcagcgcctgccgcctccggcagagagcctgaaacagaagcccccgcggcccggccgccgaaaagccctaaaaataaaaactttccgcctcggcgggtaatattgattggatttcgccgttaaatgattacttttgcacgaaacaaagcgaacataccgaaaacaatatgacattcttcaaacgctggaacaacatcgtcggctgggcggtcttcgccatcgccgccgcggtctacctgatgacgatggaacccgtttcgagcctctgggactgctcggaattcattgcaacttcctacaaactcgaagtcgggcaccctcccggtgcaccgctgttcatgatgctggcccggctggcgaccctgttcgcctttggcaatcccgactacgtgggagtggccgtaaacgccatgaactccatcgccagcgcattctgcatcctgttcctgttctggaccatcacccatctggcacggcgcctggtgactcgcggcggcggtgagctgacgcaggccaacacgctggccgtcctcggcgcaggcatcgtcggcgcgctggcctacaccttcaccgacacgttctggttctcggccatcgagggcgaggtatacgccctctcgtcgatgttcacggcgctcgtggtgtggctgatgctcaaatgggaagaggaggccgacgaaccccattcgtcacgctggatcgtgctgatcgcctacatgatgggcctttcgatcggcgtgcacatcctcaacctgctgaccattccggcgctggtattcatctactatttccgtaagacggagaaggtgaccttcaaaggcatggtctacgccacgctgatcgcgggcgccatcctgctcttcatcaacaacatcatcatcccctacacggtctatgtcggggcgatggtcgatctctttttcgtcaatacgctcggcctgcccgtcaattcgggcatcgtgctcttcgcgctggcgctgattctgggctgcggctgggccgcatggtacacccaccgcaaaggcaaggtcgtctggaacatcatcctgctctcgacgacgatggtgctcgtcggcttctcgtcgtacgcgtcggtgacgatccgcgccgcggccaatccgccgatgaacagcaacaaccccaacaacccgcacgcactgctgtcgatgctcaaccgcgaccagtacggcgaccgtccgctgctgctgggcgcctattactccgcgccgcccgaaggctacaaggaaaaatcgttctactacctcgacgaggacggcaaatacaaacccgcttcggtcatcacgggttacacccactcccccgaattcgtacacttcttcccccgcatgtgggacgcccgcaaaggcgagaaggagtacaagcagtggggcgcctaccgcacccggaccgacgtcatgcgcgacgacaagggtgaaatcctccgcgacgaacagggccgtcccatacggggcgaggtagtcgatttcggccgtaagaaactctacaacgacggttacgaggaccgcacgatcgtcgagccgacgttcgccgagaacctcaacttcttcttcaactaccagctgtcgtacatgtattggcgttacttcctgtggaatttcgtgggacgccagagcgacatacagcccacacgcacgcagatcaccgacggcaactggctgtcgggcatcaaatggatcgacgagaaattcctcggcccgcaggacgacctgccccgcgaaatcgccgaaaacaagggccgcaacacctattacttcctgcccttcctgctgggactgatcggactgatctaccagctgaaccgcgacgaacgcaacttctcgatcgtcctttggctcttcatcatgacgggcatcgcgctggtgttctatttcaacacctcgccgggcgaaccgcgcgaacgcgactacgtctacgcgggttcgttctatgcgttctcgatctggatcggcttcggcgtgctggcggtccgcgacctcgtcgcatggctcaccaagcgtaaaaacgtcaccgcggcagttgccgcgacggcggtctgcatggtcgtcccgacgatcctcgcggcgcagaactgggacgaccacgaccgttcgcaccgctacatggcgcgcgacatcggctggaactacctgatgtccacgctgcccaactcgatcatcctcaattacggcgacaacgacaccttcccgctgtggaacaatcaggaggtttacggcgtacgtcccgacgtgcgcatcatgaacacctcctatctgggcggcgaatggtacatcgacgagatgaagaccaaggccaacaaggcgccgggcgtgcccttctcgctgccgaagagcaaatacaccttcgtaaacgactgggtgccggtttacgaccgcgtcaaccgcagcgtcgatatcaaggaggtgatggactttatccgcaccgaccatccggactccaagatcaagatggccgacggttcgatggtggactacatcccgaccaagcgcatcgcgctgccggtgaacaaggagaacgccatcgcatcgggcatcgtcgccgaaaaggaccgcgacaagatggtggacacggtttacatcaacctgcgcaagaattcgatcgacaagaaccagctgatgatcctcgacatgctggccaacttcgactggaaacggcctatctacatgacgcaggtctacatcctgcaggatttcggactgatggattacctccagttcgacggctacgcctaccgtttcgtgccgatcctcaccccgatgcagaatccgtgggagatcgggcgcgtggacgccgattatgcggcgccgctgctgcgcgacaccttcagatacggcaacctctccgatccgagggtatacgccgactacttcattcagtataacctgagcgcatcgcatgcacgcgactccttcgcacgggtcgccaaggagctgctgcggcaggatcgggcgcaggaggcggtcgagctgctcgacctcggactcgaaaggatgcctacgtggcagatccgtttcaccgacaccaatacctaccccttcctcgaagcctattacgccgcatcggcgatgggcgtcgaagaggccgccgccaagggcgacgccctgctgcgcgagtatgcccaaacgctgatcgaatacatcgagtactacctacgcttcgagggaacgcagggcgacatggtatcgccgatcctcgacgagaaactcgaccagctgggcgacatctactatctggcgacctacgccggacgcaaggaagtcgtcgcggagctgaacacctactaccgttcgttcggagtctcggaagacaacctcgtggacgtcggcgacaagccccgtcaggccgacacgacgctgattcccaaaggcatgaacgaataaagacccgcaatagcggaaacgcacacgcccggcaatgcagttgccgggcgtgtgcgttttttccgcaggccgtccgaaagcggactgacagcgcgccgaagcttccggggcagcagcacccgcatgacgttggtcgtctgagccggccccttgaccatgaacgagtagccgttccgccccacccgctcggtctcgacgcaggcggcgcacgccaatacctgcggccggccgggatcggcgaccttgtccagattgtaaagcagcgcctgcgtaccgggcagcaccgcacggcgcgtcagtaccggaagcgccggatcgaacaggtcgatgaatttcccttccagcacgaaaggctccgtatccgcattttcatcgacgacagccacgatctcgtaaggtccccgttcgaggtagaaatggtttttgaattcgagcgtcccggcctgcttccctttgccgtaaagcccgcgcacggcagcaagatactccgcatcgccgcctgccgtgaggacgaaatccttcggatcgcggcggatcaccgtcggagtccactccgaaggccggcgcgagatcatggaaaaccccggcgacgagggcaatctcgtgcaggaagccgagattctcaaagcattctcgatcgtcgcgggcgtccgctgcgaaggccgcaggctgacgctcatgccccgcctgccgtggttgtgggacacgatggagtgcgtggactggcctgtcaccgacgccgacgggcggacgcaccgcatccgcttcaccgtccgccacgaacgctggctgcgccgctgcacggtcgagctggaaggcatcggcaggttcgaaggcacggacatccgtttcggcccgttcccccgtctgcagaacaacccgaagggttacgaaaccgaactgatcggaaacgcctcgtggatctgggtccgcggcatcaaaggcgacaaacgcacgatcaccgtcgaactctaaccgcaacaggccatgaaacaccttttcatcgcggcatgctgctgtctggcgtccgccggattcgcggccgagccgttcgaaatccgcggcgtgctgccgtggcacaacttcctctgcggcccgacggcttggaacaaagccgattacgaggtttacctcgacaactgcgaagccgaaggcatcaacttcatcggttttcacaactacacgggcggcggcgaacgctacgccacctacgtcgaaccgatggtgcgcatctcctaccggggcatcgtgccgcaggccatgctcgacaactcgctcagctgccgctggggcgcactgccgctccggctcaaggagtttgcgttcggctcgcagcgggcgctcgacgtaccgcgcggcgccgaagccttcggcagcgactgctccctgatttcgaaaacacccgacgaacactaccgcaacacgcagcggctgatgcgcgacgtactgcgcatggcccacgaccgggatatcgaaatggccatgggcttcgaattcggcgtcgtgccgcccgaatatttctcgctctacgccgcaggcagctgtttcttctggctcggcgcaggcaacatggtccccaatccgtgccatccgacctcggtcgaactgcaccgggcggcgctcgacgacctgctggaaaactatcccgacatcgactatgtgtggctctgactcaacgaacattcgtttctgggcgtggtcgtcgaacaggcgctgggcgaccccgccttcgcggaggtgttccgccgggaatcgggccattttgaagaggcgcagagcgacagcgaacgtttcgtgggcgtgtggtcgctcgaatacatccgccgcacgctcgaccatctccggcagaaaggctcccgcgccaagctgatcatcggcggcgggggcggcgggggccaactgccgggcatcctgcgcggactggaccgggcgctgcccgaagaggttgtcttcagctgtctgaaccccgatctgggacgcacccgacagcccgaattcctcgccgacatcgcccgccaccgcaaagtctgggccgtgccgtggctcgaaggcgacaaccagatgtggcaccagcaaccgcgcgtgggcaagatgcgagaccacgtacagctggcccgcgaacaggggcttcagggcgtggcggccattcattggcgcacggcggagacccgctataacttccgcacgttcgcccgctacgcccgcacgtcggacgacgcgaccgtcgaaacgctctacaaggagtatttcgaagaggatttcggcgcgcaggccgccgccgcactcgcgcccctgatggccgccgtcgatacggccaacgcatgggagggaccgcagtccccggagtacttcgcattccgccccgactggggagtgctcgacgaagcgaacgccgcttcgcggcaggggatcatcgacgccatcgacgccgtgcaggacaaagagcagacgccgcagcagcgccgcaacctgaaaagtttccgggccatgctctcgttcgagttgctgctggacaaggtcgtacgggcgatggctccgggctgggagctgcgcgacaaaacccttgcggagaaccgtcccgcatcgcgcgaagcctgcgccgcggcgctccgcgagttggaatccgcccccgtcgaagagctgatccgcacctatgtttcgcgcaccgggtcacgcggcgaaatgggcatcctgacctcgatcaaccagcgactatggaacaattacctgctgctgaaaaactacctgcaagaaaacacgcattaaaataaccaaccgatcaacaattatccgccatgactaaaaaactgctaccactactgttgctgctgggcggcctgtacggcgcggaaaattccgcgcagtcgcagacccggttcgaccggccgtttgcgccccaagagggtttcgttgcgactcccgaacgtccctgccgggacgaaatctgcctgaacggccgctggaagtccacgcccccgaaccgatcgtcgaacgcaacatcgccgagatcaacgaatgggtgcgcatcacccgtgaatgcgaccatacgcgcaactggatttcgggcgacggcgagacccagaccgacaccgacctgccgaccgtcatcggccactactgcaacacgccgctgatgctcgaatggaagagcaagggcaaaccgtggggcgtcggcgagatgggtatgtgctacgccggaaccccggcccacgtctcggtagtcaacggcgaccgcgccttcgaatcgcaggaaggccgcatggagggactcgcgggcgaagcgttcgaaacgatctccatgcagcgcggtctggatgcctgctacgcctcgattttcaacctcgcgtggtacggcgtgcagccgctcgaaatcggactcaacgacatcacccgtcccgtagaagcggaggacggcatctggttcggcccctaccgggaaggagttccgggcgtccagcccgaacggctcggcccctacaccaccacattcaaccccggttacgatccccggcttccgctgtaccgcccgtgggcgttgttcgagggcgtgaaagccgcattcagcgacacctatgccgcccagcccaacaaatgggccgtacgcaaacacaccgagatcagcgaaccggttccggccgcccgcgacgtcgtctggatctccgccgatccggagtcgaaggccgaaaggcagttcgaagagctgtccgtagcattccggccgcttgacacacgccgcaatcagctcatcctgctcgacggcatccgcccggcggaagatccggccctcgtcgaacggctccgcgccgcactcggcgccggaagcaccctgctggtatggaacatctcgcccgcggcgcttccgctggtcgaaaagctcggcggccacgccgtgacgctcactccgcgcaatgccgccagctacatcatacgcggcaaacactcgctgctcaacggtcaggacctttcgacgctctatttcaacgaacggaccaaagagccggtttccagcttcgtaatgccctccggcgacgcctacgccaccctgctcgacccctgcaacacggattggagcaaatggaactatcaggaagagaacatcaaaaccgggcaggtgctccgcagcgagcgggagagcaagccgctcggcagcgtactgctccgcggcgaggccggccggggcgagctgctgctctcggcgatcgaccccttcgtgctgggcaacaagggcagtgcgctgatccatgaaatgctgcacaatctgggcgcacggttcaacggccgcccgcgccatatcccggcggcgctcgaccggaacggcacggtcgtacacgccctgctgagcggcacctatgccggcggaagcatggacgaggtcatggcccgcgactacctcgaaggcactccggcggccgacctgcggccgggagcggtaacctccggaagatattggggcgccgtggacagcaacgaagagggattctggaacttcgaaacgatgaacctcaagggcgagcagaaagactgcgccgtttacctgagtttctggctgttcagcccccggtcgctggtcaacctgctgctggagcccaacatgccccgtctcgatctggaattcgcggtggacgacaaactggccgtatacgtcaacagcaaccttctcgacaacgcgatcaaacggcaggacaaccccgctctgccgcagcgcatcgaaggcattccgctcgaaaagggctggaaccatgttctgctcaaggtaggccagttatggggaggctggaacggccgcttccgcttcaccgccaccgatcccgcctacatgcggcagctcgaatcggtcatcatgcagtaaaaccccggaagccatgcgaatcaaactcctgaacacggcgctctgcctgctcttcacggccgccggctttcaaaagccagagaccgggcaccaaaggtctcaaaaacgccgaactggacctctcggcccactataaggagatcgtgcagactcgaaccgaacgcgccgtgcttcccgatgcggagagcgtcccgttcctgaccgtcgatgccgcagcagcgaccggccgatagcgagaccgcagcaggcaggcgaggaccgcagcgtggaaaccgcagcccgacaaaaaagggttgcagagaaagcgaaaaaaaataccgcactccgaaaagtgcggtatttcttattccacaatatccgaagcccctatttggtttcgggccgtccggcagggtgctcccccggagttccggactccttcttcttgctgtagaggaaacgcttgattttgtgcgtcggggttttgacgaagtcgtccttctcctcgacgacctccgagatacgcgaaaaacggttgaccttggcattcacgaaatccagaatctcttttttaagctgttcggtcttggcctccaacgcctctttcttggaggtccactcctcgcgccagtcgtcgatcatgctttcgatctcgtcgcggttgaagtgcacgagggccaccagacggccctgctgttcggtgacgatcgaatcggcgatgtagacatgcgaattgaggacggtttcgatgtcctccggatagatattttcgccgcccggccccacgatcatgtttttcagacgccccttgatatagagccatccgtccttgtcgaattcgccgaggtcgcccgtccggaaccagccgtcggccgtaaatacctccttcgtggcttcgggattcttgaaatagccgagcatgacgctgggcgagtgcgccacgatctcgccctgacgggtatcgggattgatattctccagccgcagttcgacgcccggagcctgcggaccggtcgaaccgagccgcacctgcgagggcgcggcaccggccagcagcggcgcagtctcggtaagtccgtaaccgatggcgtaaggcaccttggcctccagcaggaatttttcggcgtctccgtcgagcttcgcgccgccgattccgaggaaacgcaggcggccgccgaagagcttgagcagtttcttgcccgcgacgcggtgcaggtaacggcgcatgaagccgatcttatagagcgtgcgccagaatccggtggacttgaatttggcgagcacctgcaagcggtagattttttcgatgatcagcggcacgatcagcatcaccgagggacgcaccgcgcgcaacgccggcatcagggccgaggccgtgggcggacggtccagatatacgacctgcgcgcccatcgagaagggatagatcatgccgatcgaacattcgtacgtatgggagagcggcagcaccgaaaggaatacgtcgtcgggctgcacggggaagatgctcgacgaaatgcccacctgcgcgcagagcgccgaatgggtcagcatcacgcccttgggcttggaggtagttcccgaagtatagatgatgaccgccagatcatcgggtttgggcaccgccgtcgaaccttgggcatggacctgctgggcgatgactccgaggttcttggtgcggaccacgacgttgagccgtccgatggtctctttcgaaagtttggtgaaaagtttgtcggagacgagcagcgcacgggcctccgaatgctcgatgatcatgtccagctcttcgcccgaaaagtccggaagaatcggcacggcgatcatgccggccgaagtgacggcaaagtagcagacgccccagttgggcatgttgctgctcagcagggccaccttgtcgccggcctgcaggccggctcccgtaaggatttcctgcaccttggcaatacgacggtccacctcggcgtaagtcacgtcgtcgccttcgaacatcgaaaatgcgactttcgacgcgaacttttccacgctgttgcgagccagttcgtaaagtgtattgatggtcataatttttcgttttcaactacgtccgaataacgtgaaagtttggggcgaaattactaatttccggttaaaaaacactatttttgggacaaatttatcactatgctcgactatcagcacatcaaaaaacttgccgccgacgcaggattcgatctctgcggccttgcgccctgcggccacatggctcagaacgaggcgtggctccgggcgtggctgggcaaggggtatcagtcgtcgctgacctacatggaacgcaatgtcgagaaacgcgccgatccgcgcaaactcgtcgaaggggcgcgtacggcggtggtctgcgccgtaagttacaaaaaccgcatcggcgaagggtatccccccggacaccgcaccaaaatcgcctcctatgcctgcacggcggactaccacacgacgataaagggaatgctgaacggcatgctggaacatctcaaagccgccgatcccggactcggcggccgggcgttcgtcgacacggccccgctgctcgagaaacagctcgccgtagaggccggactgggctggataggccgccagtcgctgctcgtcacgccccgccacggcacctatgtcctgctgggcgagctgctcctgaccgacgaagccgacgcctacgacgccccgttcgagggttcccgctgcggccgctgccgcaactgcatcgagagctgtcccacgggcgccatcgtcgccccgaaggtgatcgacacgggccgctgcatctcgtgccacaccatcgaacgggagccgtccggaggaatcgacctcgacggctggattttcggctgcgaccgctgccagagctgctgtccccacaaccagaaggcgccgatgcacgccaatcgggcgttcgatcccgtcttcgacccgctgacgatggatgccgcagcatggatggcgttggacgaaacggagttcgaagcccgcatgggcgcaacgcccctgacccgcagcggtctggcgcgcatccgcggcaatatcaaaacagaataagcgctttcgccccgaccgcataagagccctccggcggtgcaagaatttactccgccagcgcgatgattcgccccggcaatccgccccctcccccgactgcgcaagaagctcccggcagtccgagaaatcgccctgactgcacaataagccccctcggcgagacgaaaaaagcggatccccgatggggacccgcttcgtatcgcatggatgaatattcctatttcgaaagctccgcgagggctgccttggcattctcggcggcgggaccgtcggtcacctgcttgaatgcggcgatagcctgcggcttcatctccttggcgttgtaggcggcgcccagcaggtagtacatcaggctcttgtcggcagcgtcggtctgcgcgtcggcagcggcctgtcccagctcgatcaccttcgcatagtccttcttgttggcataagcctgcagacgaacgttctgggcgagtgcgctttcgggattcttggccagcaggtcgtcggccatcttgataatgccgtcgaaatcgttggcagcctgcatcttggcaaccatattattggtatagagcgccatgccctccttggccttggctacatcctcggcgtatttgggatgggtcttggcggcgatggcctcgtaaacctccatacccttctcatactgtgccatgtcgccgctgctcatcgccatttcgcagtagctcatcgccagattgagcgccatgcccgtattgtcggggtcggcggcgtaacccttggcgaaaatctccgaagcggtcgcgtaatccttgttgttgaaagcgtcgccgccctgtatctggtaaatcttggcaacccagccgttcgatttggccatctggttcatatcgccgtaaagctccgacagctcggccgacttggtgaaattcttcagcgcctcctcgtaattcttggttttcagtgcactgccgcccagcatgaagtagcatttgggaagcgtggtcttggcgatggccaccagcgaagcggcggtctcgtcgtccatgcccttgtcgattacctcttcgaattttgcggcggctcccgcgaagtccttgtttccgaaagctgctgcagcttcgttatacaccgccgtaagatcctgcgccgaaagcgacaccgttgccagcagcgcgattaccgataccaataattttttcattgcctattccgttttttaaagtttttcagttcgtgcacccgttttcggatacgttgatcgcaaaagtatattttttttcttttttttcaaaatctaattgcgcaaacctgcgaaaaaagaggtcatcaactcctcgcattcttcgccgagcacgccccgcaccaccgtcgttttaggatggaacaccgtctccgaatagcgtctgtaacccttcttcgggtcgtcggcgccccacaccacgcggcccacctgcgcccagcctgtggctccggcgcacatgatgcacggttcgacggtgacgtacagcgtgcagccctgcaggtatttgccgccgagggtggatgcggcggcggtcagcgcctgcatctcggcatgggccgtaggatcggagagcgtctcgaccagattatggccgcgtcccacgaccgcgccgtcggccacgaccaccgcgccgatgggcacttcctgcaactgtaacgctttgcgcgcctcgtttagtgcgagacgcatgaatttttcatcgttttttttctgatcttccacgggcgggattttttgcaaaagtaagcaaaaaactctttgcgactgctccgcagcacaaataatatcttccgggattccttatttcgcatcttttgtttaactttgcgggttgcaaggacaaattgaacaaaaaaccatatttcctatgtacagaacccatacgtgcggctgtctgagagccgacgacgtaaaccgaaccgtcaccttagccgggtgggtgcagaaagtccgcaacctcggcgccatgaccttcatcgacctcagggaccgttacggaatcacgcagatcgtggtcgaggaacactcgcccgccgaagcccgcgagacggcctgcaggctgggccgcgaatgggtcgtccaggtgaccggcagggtgatcgagcgttcgtcgaagaaccccaaaatggccacgggcgacatcgaggtggcagccgagaaggtggtcgtgctccatgaggctgaagttcctcccttcaccatcgaggagacgtcggacggcggcgacgacctgcgcatgaaataccgctatctcgacctgcggcgtccgcccctgcagcgcaacatgatcctgcggcacaagatggcgcaggagatccgccgcttcctcgattcggagggcttcctcgaaatcgaaaccccctatctggtcaactcgacgcccgaaggcgcccgcgacttcgtggttcccagccgcatgagtcccaaccagttctatgccctgccccagtcgccgcagaccctcaagcagctgctgatggtggccggatacgacaaatatttccagatcgtgcgctgcttccgcgacgaggacctgcgcgccgaccgtcagcccgaattcacacagatcgactgcgaaatgtcgttcgtcgagcaggaggacgtgctggagatcttcgaacgctgggccaagcacatgttcaaggaggtgatggacatcgaactgaccgaaccgctgcgccgcatgccgtggatcgaggcgatggagaaatacggttcggacaaacccgacctgcgcttcggcatggagttcgccgacatcaccgatctggcgaaaggccacggtttttcggttttcgacgatgcagaatacgtcaccggattcgccgcaacgggctgcgccgtctacacgcgcaagcagatcgacgccctgacggagttcgtcaagcgccagcagatcggcgccaaggggctgatctggatccgcgtcgaggagtccggcgtgaaatcttcgatcgacaagttctacacgcccgacgaggtccgcgcgatggccgaccgctgcggcgccaaggccggagacatggtcttcatcctctgcggcaagaagttcaagacgctgacgcagctctgcgccctgcgtctggaagtggcccagcagctgggactgcgcgacccgaaaaagttcgcgccgctctggatcgtggacttcccgctcttcgagtgggacgacgagacgcagcgctattacgccatgcaccatcccttcacctcgcccaagctggaggacgtacagtatatagacagcgaccccggccgcgtacgcgccaacgcctacgacttcgtctgcaacggcaccgagatcggcggcggttcgatccgtatccacgactcgaaactgcaggccaaaatgttcgaggtgctgggcttcacggccgaagaggctcaggtgcgcttcggcttcctgatggacgccttcaagttcggcgcgccccctcacggcggtctcgccttcggcttcgaccggttgtgttcgctgttcggcggctcggattcgatccgcgactacatcgccttcccgaagaacaacgccggccgcgacgtgatgcttgacgcaccgggctgcatcgaccagtcgcagctcgacgaactgtatctggagctgcggaagccggaggagtaaagcaaaattacgtttttcatttcttctgaacaacgagaagcgccgataatgtaatttatcggcgcttctcgttgttacaaacctatcaatctgagagactatgttctaatctatcatagccaaaataagcatctataatattttttcattacacgatacattaaacagcccacatatcttatcaatattaataaattcgctgaatcccatttcccccagattcaaaactccaataacaatgccaaacccggccatctattttatccaaaagcaaaaaactataaatattagtggtcggatagatttcaaaccgatcattcacccaatcatcttcatcaccaacaagagacttatagtttacataagtttcatatcttttattattatcatagctccattggattctatagatataccccattttagtatccaatttcaaaaaattatacatatttgaagtcggataaattttatatcgattagtcgattttgcaaggacttctccgtgaacttttatcgatttttcagcatctatagtagatgttgaatttataattgatgtagcaatagaatccaactctgttgtctgcaaaggcattcgcgactcattagaatcaaccttaatcgaatcacgctgaatttcttgcgcaaataaacaaccattccaaaataggaatacaaataaaaataaaaaagatttcataactgggtccaatttttctgtccgcaccccggcagtataaacaaaaaagaaagcgtggtgccgaagcccatttcagaatcgcaggtcgtaggatacctttgcagccaaaataagcaacaacccccacgcctatacccgcagaatacggatacgacgcggcaagatgtttgcctattccgcgctgcaatgaatttcctacgttcacgattcgggaacagacttacactttccgtgtttgtcagtatgttcgacaaatataggattattttttgaaaaagcactatctttgtccgacgaaaagcgtcattgcagggtttcggcagatcgccacgtcgcctgcggctccccgcaatgacaaacaaaactaaaaccgccgccatgtcagcacccttagccgaacgcctgcgcccgaagaccatcgacgattacatcggtcaggaacatctcgtgggcaaaaacggggtgttccgcaaattcttcgagacgggcaacgtgccgtcgttcatcctgtgggggcctccgggcgtgggcaagaccacgctggcgaagatcgtcgccacgcaactcgaacgccccttcttcaccctttcggccgtcacgtcgggcgtgaaggacgtgcgcgaggtgatcgagtcggccaagaaacagcgtttcttcgacgccaagccgccgctgctgttcatcgacgaaatccaccgcttcaacaaatcgcagcaggattcgctgctgggcgccgtcgagcagggcaccgtgacgctgatcggcgccacgaccgaaaacccctcgttcgaagtgatctcgccgctgctgagccgctgtcaggtctacattctccgcccgatggaggacaaggacctgcagacgctgctggaccgtgcgctcacgaccgacgcggaactcaaggcccgcgaagtcgaagttcggcagaccggcgcgctcttcaaattctcaggcggcgacgcccgcaaactgctcaatatcctcgacatcctcgccggggcgaccgacggcaagctgaccatcaccgaccagtacgtcaccgactgtctccagcagaatatcgcgctgtacgacaaaaacggcgaacagcattacgacgtcatctcggccttcatcaagtcggtgcggggcagcgaccccaacgccgcgatctactacctcgcgcgcatgctggccggaggcgaagagccgcgttttctggcccggcggctggtgattctcgcttcggaggacatcgggcttgcgaaccccaacgccctgctgctggccaacgcctgcttcgacacggtacacaagatcggcatgcccgaagcgcgcatcacgctggccgagacgacgatctacctcgccaccagccccaagagcaactcagcctacatggcgatcaacaaggccatgtcgctggtcgaacacgacaccaccaaccgccccgtgccgctgcacctgcgcaacgccccgaccaagttgatggacaaggcgggctacggcaaaggctacaaatacgcccacgatttcgcaggcaacttcgccgagcaggagttcctgcccgacacgctggcgggcaccaaattctacgagcccaacaccggcaacgcgaccgaagcgaaaatcgccgaacgcatgcgcgaactctggcgcgacaaatacaagtaaatgaaaaagatcggcatcatatccgacacgcacggcaccttcgacggcacgctgcgggaattcctcaaggacgtcgatgaaatctggcacgcgggcgacatcgggtcgctcgaactggccgacgccatcgccgcgttcaagcccctgcgggccgtatcgggcaacatcgacggcggccttacgcgccgcgtataccccgatttcctctcgttcgaatgcgaaggggtccgggtcctgatgacccacatcggcggctacccgcgccgctacgacccgcgcgccgtggcgaagatccagtccctgcgcccgaaactcttcatcgccggacactcgcacatcctcaaagtcgcctacgacccggtttacgacctgctgcacgtcaatcccggcgccgccggagagtacgggttccacaaagtccgcaccgccgtgcggctggtcatcgacggcgccgacatgcgcgacatggaggtcggcgaatggccgcggagatagcagaaacgggaataaaatatgcggcgtgatgacgccgcatattttgttactacttgacaagtccgccgcctaacggccccatccgaaacgcaatccgacagagaacccgccgaaaaagccctcgttagcgagcaagggttcagaatcatatccgaaattccaagaggcaaaatcaccgatataccgcgcagcaacctccagataaaggttgcgggacacccggaaatcgagtcccaaggcgagactgacgaccggagccgccaagccttcgcggctctccccggcatccgtcagaatcgaagccgtatagacattcacgcccaaacctccgcgcacgaaatagaacgatcccatacgctgaatgtaaaaacggcgctcgtaatgcggaatcaccgcgaaaatatcgactgaggtgcccggatcagctcttctttcggaagcggaagcactctccagactgcgataggccagctcggcatgaatgccgttcctgccgtcgaaataataggcatacgaaacagtcgccccgtgcgtatgcacatatgtattcgaaaggaaatcgtacgtcgcacccagcatgtgcggcaaggcgggcgctttcagtccgaaacggcgctcggccggtttcagtttgtcgttcggcgtacgcaccacccgcgcgtcgccgatttcaagataatcgacttgggtcacgggaataaaatgcgacgtttcggggtcgtccgcaggaaaaaagaaaacgttgccggcccggttgctcgaatcggaaaccttacattcgatcacacggccgtctttggtgtgaatccggtcctaagccatacacgcacagcccgcagacaaaaacaagaacgcaaaaaagaactttatcattttcaagagggattgatgggatatacaaatatattataattatcggatactttgccgcttttaacgtccgaaaagcatattccggcaaaaatttattatatttgggccacatcctgcgcaaacaggcatggaggacggccgggttattccgtacaattcatcttgctaccgcaggggaattacagatgtcgcccggcatacccgcgtccccggaacacccgattcgatcccgaagggtaggggatcatcatttatttaaccaatatcggtatgataagaaaatcctatttcaaattcgcagctctcctgagcatgtgtatcactgccgcctgcagcgacgacgaccccggaaaaggagggggggggaaatctgaggtaaaggtccccgaaaatgcggtcgatctctccgccgccggaaccgcaaactgctacatcgtaaaaccgggcggcacggtcgtgttcgacgcgcagtacaaaggcaactccacgaccgaaagcatcggcgatcccgtcactgccgaactcgtctggcaagacgccaaaaatctgattcaggacatctattacgtctccaaggagaaaaaaatcgtcgccgtgaccgctccgggcacaagcggcaacgccgtcgtcgcggcctgcggcgccgacggagagatactctggagctggcacctgtggatcgccgactacgatcccgccgcatcgctctacaccaccccggccaacgcttcgggcacgacatggaccttcatggaccgcaacgtcggcgccacgaccaacgcccccgacagcttcgactgccacggcatgatctaccagtggggacgcaaagaccccttcacctcggccggaacgttcaccataatcaacgaggattacagctatcaggtggacggcgaacgccccatttacaacatcctcaacgaagaacttcccaaaatgcgcacccgcgccgaataccacggaacgatcgcaaagtcgctccgcaatccggcggtattctatgccatgacttacaatttcaccggagaaacggatgaatacggacaggaaatcgtgctgaacgactaccggaccaaagactggaccgacgtttcgaacgacgattactggggcggcgtatcgggcaagaaaaccatctacgacccctgccccgtcggctacaaagtgccgacctgcgacaaggacggaaatacgccctacgcgtggctggtttacgccgacatgacgtgggacgacaccaaccacggcgccacgcaaaacggccagtggttccccgccgccggcacgcgcgtctacgcatcgggcggactcgaccatcaggagctgaatccctacggcggcatgtggatcggcaccgcgggaaaagccagcgccaacatcgaggaataccccgaactctacggccagtacatgttcatcgtcaacggcaaacggacctttaaagtgagcaaggacgcccgttcgcaaggcatgtcgatgcgctgcgtaaaagagtaaaaaccctttcagaacacgatacggaccgtttcaggcaggaacggtccgtgttttttcaggggcaagacgttcagagacagccgaatatggaaggccaaataacttaacataatatttaccacatgtacgtcgttagttagtcgaagaatcagaagttgaaattattaattttatgacgacgcaacatgcaaatcaagatctcgaagacgctcgaggctattatagcccgggcggcatttaatacgaccaaggccggtctcgaccactcgctcaaagactttctcacgctggaactgctccgcgaggagggatcgctcgcctaccagcttttatcctcccgtctcaaggactgggaactctaccagatacgcctgcgcatcgaacgcgaaatgctcgccgggcagcagagcacgacccaatcccccgaagagttctaccgtgccttcaccgaagagctgcgggcctgttcgggcgccgcacggagcgtttcgacggcccacgcgctgcgggccatcgtcggcgaccgcacgacggcaacttcgcgcatactggaaatgtacggcgtaacgggtacggtggtggacgaagacctcaagaagttcgccgtgggcgacgacttccgcaccgaaattcaggtgcacatgctcgacttcaacgaagagaacaaacccgaagagaaaacctcgtcacacctgctcgacaaattcggcgtgaacctcacgcgcatggcccgcgagggcaaaatcgaccccgtcgtggggcgcgagcaggagatcgagcgcgtagtccagatactctcgcgccgcaagaagaacaatccgatcctgatcggcgaagcgggcgtgggcaagagcgccatcgtcgagggactggccctgcgcatcgcaagcggcgaagtgccctacaccatcgccgacaaaacgctcttctcgctcgacgtctcgtcgctggtggccggcacgaaattccgcggcgaattcgaggagcgcatgcagcagctgctcgacgaactgcgcaaggcgaaggatacgatcatcttcatcgacgagatacacaccatcgtgggcgcaggttcgacgcagggcagtctcgacacggccaacatcctcaagccggcgctggcgcgcggcgagctgcagaccatcggcgccaccacgctcgacgagtaccgcgagaacatcgagagcgattcggccctcgaacgccgcttccagaaggtcgtggtggagcctaccacgcccgaccagacgctccagatcctgcgcaacatcgcgccccactacgaacgccatcacaaggtgcgttatacggaagaggccctgcaggcgtgcgtgaccctcacgggccgctatatcaccgaccgcttcttccccgacaaggccatcgacgtcatggacgaagctggctcgcgcatacacctgcagtcggcgcgcgaaccggccgagctgcgcgaaatggagacggcgctcaccgacgcgcagcgcgaacgccgcgaagcggtcgaagcgctggtctacgaaaaagccgcctcggcgcggatgcgcgaaatcgcgctccgctccaaactgggcgaaacccgtgccgaatggcagcggtcgctggagaccaaccccgtagaggtcactgcggaacacatccagcaggtcatcacctcgatcacgggtattcccgccgaacggatatcgggcggcgagatgacgcgcctgcagatgctctacgaccacctcgcacgccgcgtcgtgggacagcaggaggccgtggagaggatcgcccgcacaatccgccgctcgcgcgccggactcaaggacgaaaaccgcccgatcggcgtcttcctcttcgtgggtcctacgggcgtgggcaagaccctgctggccaaggaggtctcgaagtggctgttcgacgagcaccggggcctgatccgcatcgacatgagcgaatacggcgagaagcacaatgtcgcgcgtctgatcggatcgcctccgggatacgtcggttacggcgagggcggccagctcaccgaagcggtccgccgccagccctactccgtggtgctgttcgacgagatcgagaaggcgcaccccgaagtcttcaactccatgctgcagatcttcgacgagggacacctcaccgacggttcgggccgcagggtggacttccgcaacacgatcatcatcatgacctcgaacgtcgggtcgcgcaacgtggtccagaaatcggtgcaggtgggttacagcaccgtctcgaagagcgccacggcggtcgccgccccgcagtgcgagtaccgcaaagccctcgaacagacctttgcgccggagttcctcaaccgcatcgacgacatcgtgctgttccgcacgctggagctctccgacgtggagcggatcatcgagctggagctgcagggactcttcgagcacacgcgccggctgggctacaaggtgaagatcaccgacggagccaaacgccgtctggcagccatgggctacgaatcgcgctatggcgtacgttcgctcaagcgcacactgatggacaacgtcgaggaaccgctctcgaccctgattatcgacggcaagttgcacgaaggcgacacggtcgtcgtcgaatcgggcaagccgcacggcgtccggatacgcgtggcatgacagacggtcgatttcccatcttcccgttgaaagagaccggtttcaaaccggtctcttttcttattccgccacttttttattccataattgcctgaaagattatttttcaactaaatttgtccggatttaatacagtttcataacaccgacatgcgtcagatgctcctgaaagcccttgcgtcagggcttattatgtccttgtttccattcgccgcgatatcggcgcccgccgggccgtcacacgccgacagcctgctcaggcttttatccaagacacacgatgccgtcggccgggaacggatatacgtccagctggccgacctgagcggagacagtctcgaactcgcagcgccctattgggacgcggcgctcgccgaagcgcggaaatccggagacctctacggctgcaaggacgcgctggactttctggtacgcaaattcgcaggccgggactcgcagcgggccgagaaatacatcgcccttgcggacagcattcttccgggaccgcgccacgccctgttccgctcgtcgctctacgcctactacatctggaagctgatgaacgacaacaatgcggtcgaaaccgtaaaacacgaactcgacagactcaagaccaaaatccacaacgaactctcgcccgaagagcgcatcgaatgggaattcctgacgggactctccctagacttctcgtcgctggcgaccgaagcctacgacaacatcggcaaggcgatcccctatgtggagcaggcattgaaaaaactcgaagcttatccgttggaagagcgtctccacatggagcggatctgccgcgacgagctttccgaactctacatgctcagcaaagacaaacacgccgaaaagcagatccagcaatgtatcgacctgcaccgcgcatggctggcgatggacgaccgcttcgaacgcccctaccgcgacacgacgggctacacgatgcgcgcctactcgaagatgctctatctgcgcgagcttatctccaaagagaaggcgacccaatattacgggaagtgcatggagctggcccgcgccagaggcgatctggccgagatttacagcaccagcgcccgctattaccagtacatggaggaatacgagcgggccgtggcctatatcgactcggccgtaaccgtctacaagcgcaacggcacaaaagcggatttcgcctccatatacgcagtgcagtcgtggctttacgagcatctgggcgactacaaaaacgccctcgaagcgctgcgcgaatccaatacgatccgccacaacgaccgcgtggaagaggcgcagaacagcctcgccgagatgcagaccctgttcgaagtgggacagctggaacttgaaaaatcccggctggccaaccgcatgaaattcatcgccctgcttgccggcggggtgctgctgctgctgctcgtcggctggagcgtctaccaatacgtcatggtccgacggctgaaacagatcaggcggcagctcaccgacgccaaccaagagataacccgccagagccgccgcgccacggagagcgaaaagatgaaaacggccttcatcaactccatgtgccacgaaatccgcacgccgctcaacgctatcaacggattttcggaactgctgctcgatgacaccctcgacgcccatacgcggcgcgaattccgcgaacagatatggaccaacacgaccgcgctgaccaccctgctggaaaacatgctcgaactgtcgagtcttgtctgctccgaagcgccgctgccgcagaccgacaccgatatcggcctgctatgcgccgaacggctggaataccagaagcggcagtcgaacaacccgcaggtggagtatatcttcaagggggggggtgaaggttcctgcatcattccgaccaacgtcttctacatgacccgcgtgatcgacaacctgctgcagaacgccgccaaattcaccgccgcaggctccgtcacgctctcctgcaagaaggatgacagcaaacgcagactacgcatccgcgtggccgacaccggcatcggcatcgaccccgacaagcgggagtgggtattcgaacgcttcgccaaagtggaccccttcaaaccgggttcgggcatcgggctctatctctgccgcctgatcgtcacgcggctcggaggcgaaatccgcgtctgccccgaataccgcgcaggctgctgcatcgatatcgtcctcccctgctgaagctgaaaatccgccccttccgggcggatttttcgtatcggacggagctgcggattgcaatccggagttaattagctatctttgcatcctaaatccggaacgcaatgtacagtttctcgacttataaagatcaatacaagtccaatctgaaactggccctgcccgtcgtactgacgcagctgggccagattctcacgcaggtagccgacaacctgatggtcggccgctacggcggcggcgaccccgtgccgctggccgccgtatcgttcggcggctcggtattcttcatcctcttcatcgccgccatcggcatcgcgctgggcatgacacccctcgtgggcgagctttacgcgcagggcgaccgggagaagtcggcggggctgctgcagaacggcatcctgttctacacgctgctgggattcgcaatggcggtcgtccaatactccgtcatcccgctcatgtaccgcctcggccagcccgtcgacgtggtcgatgcggccatcccctattaccgtatgctggtcttcagcatgccgttcgtgatgcttttcttcgccttcaagcagttcctcgaaggcgtgggcaacaccaaggtcgagatggtcgtgacgatcgtcgccaatctggccaacatcggcttcaactgggtcttcatctacggacgcttctcgcttcccgaaatgggcgccgagggcgcgggtctgggcacgctgctgtcgcgcatcatcgccccgatcctgatggtcggctacttctacagccgcgagcgctaccgcggctacctcgacggattctcgccccgcaactactcgtgggccacggtgaaaaaactgctgcacatgggacttccgatctcgatgcagatgtttctcgaagcttcggcgttcgtcggtaccggcatcatgatgggctggttcaacaaggagaccatgagcgccaaccagatcgccgtcaccatcggcaactgcgccttcatgattgtcatgtcgatcggcgccgccaccaccatccgcgtgtcgcactgctacggcgcccgcaacatcggcgagctgtcgctggcggccaaggcgtcgtatcatctggtgctggcgtggaacgccttcgcggcgctggtcttcatcaccatgcgcaacgtcattccgaccttcttcaccaccaatgccgaagtgatcgccatcgcctcgcagctgatggtcttcgccgcgctgtaccagctttcggacggcattcagaacgtctcggtaggcatcctgcgcggcattcaggacgtgaagatcatcatgccgatcgccttcgtctcctactggctgctcaacctgcccgtgggctacctgttcggcttcacgctcggcatgggtccgtcgggacttttcctcggcttctcgttcggtctgtcggccgccgccgtgatgatgatcctccgcatacgacgcagcatacgacgcttgtacctcaacagcaattaaaaattaaaaaattcagaatttttgcgtatctttacgcaaattataccctccatggataccgaaaaacaacatacgaaagcattcaaacccgaaataggccgcggctgctccttctgcaactgcggttcggaatgcgaagccaaactctgcgacggatgtttcaaactccacgagaccgcatggctcgaagagtaccccgaaaaccttccgaccgacatcgtcgaagtgcgtttcaagaacacccgccgcgcattctaccagaatgtcaacaacctgccgctcaagcggggcgacatcgtggcggtcgaagcttcgcccggccacgacatcggcatcgtctcgctcacgggcgatctggtggcgcgccagatgcgccgcacgggattcaaccccttcaacggcgaattcaagaagatataccgcaaagccaagccctacgacatcgagaagtggcaggaagccatcgaactggaacacgagacgatgatcgcgtcgcgccagatcgcggccgacatgggactcaacatgaagatcggcgacgtggagtatcagggcgacaagatcaaggccattttctactatatcgccgacgagcgcgtggacttccgcgaactaatcaaggtcttcgcagaacggttccacatacgtatcgagatgaaacagatcggcgcgcggcaggaggcgggacgcatcggcggactgggtgcctgcggacgcgagttgtgctgcgcatcgtggatgtcgagtttttcgagcgtcacgaccggcgccgcccgcgtacaggaaatttcgctcaatccccagaaactcgccggacaatgctcgaagctcaagtgctgcatgatgtacgagtacgacacctacgtcgacgcccgcaaggagttcccgcgtctgcgcgaaccgctgcaggccatggacggcgaatactatctggtcaagaacgacattctggccggcacgatgaccttctcgtcgagcaaggatgcgatggtcaacgtcaccacgctctccatcgcgcgcgtcagggagatcgtctcgctgaaccgcgccggcaagaaggtagaccggctgcaagctgccgaggacatagccccggcggccgaagagccgacctaccgttcggaggaggacagtatcacccgtttcgatcaggccaagcgccgcagcaagcggagccgcggcaaagggggccggcagaacggacaggattcgcaggaagcgggacagcaggctgcaggccggcaggaacagcccgatcagcagggccggcagcaggaacgccgcccgcggcgcaacgaccgtccccgcaatggcgaaggccgcagcagtgaggggcgcaacaacgaaggccgcaacggaaatccggaacgccgcaacaacggcgaacgccgtgacggagagaaccgcgaaaaccgcaacgccaacaacggaggccgcagaggcaactccggcagcgaaaaccggaccggcgaaagcggcgacacccgcaacggcaacaacaacgaagcccgcaacggcaatacgaacaacggcaacgccgccgaacgccgcgaaggcaacagccgcggtcggaacaacaaccgcaaccgccgccgtccgaacaacgaccgtccgcgcggcgaaggcagcgaaaacggcaataacggcggcaacggaaacaacggcggcaacggcgcaaacgaataacggtgcaacggacggcaggtgacataacggcacgctgcggagccgtatccccatatggggcagaccggatcagaccggaccgcactgccgatccatgcaggcaagagaccggcaggcaagatcgcacggacgccgatccctacggaacattccccggcgcagacggccgcgcgcccatcccgatcgaggggcggaaatgctccgcagcggatattgcggccgtaaaattcgccggagcggcaatgcgcccgcggggttccgtagccgcaaaaatgctccgtacggcagccagcctgtccggtccgggagcgatacgcccgatgcgcgcggcttgccgcacggcgctcgccgccgcggcacttctcgccgcaggctgcatgtccccccacggagccattgcgaccgacgtcaattcggcgtcgtggagcgatcccgccccgctcaccctcgccaacgccgatacgacgacgctccgcgacgtcaaccttttcctgcgctgcaacgaccggttcgcggaggattcgctgaccgtccgcatccgggtgcgcacgccggactcgctccaacacgaagaaccgttcgtgatggtcattcccccggcacatactccggccgcgatctcgcgcgaagccgacatcccctaccgccgccgcgtacggttcgaccgtacgggcgactaccacttgacaatcaccccctgccgccccgtcgaaggcgtcgaagcggtaggcatccatatcgtaaaaagccaatagagacaatgggcaaagataaactccgcaggttccgcgagaacctgactttcgactgtttcgtacaacccgaattcgacgaggtattccactgcgaccatcccctcaaggggcgctggcgcagcgactttttccgcaacgacaaccccatcgtgctggagctgggctgcggcaagggcgaatacaccgttgcgctggccgaacacgacccgtcgcgcaactatatcggcatcgacatcaaaggcgcccgcatgtggcgcggcgcaaagagcgtcacggagcggaaaatcgccaatgcgggctttctgcgcacgcgcgtggagttcatcaacggcctgttcgccgaaaacgaggtggacgaaatctggatcacctttcccgatccgcagctcaaaagccgccgggctaagaagcgtctcacctcgccgctgttcctcgaatactacgcccggctgttgaaacccgcagggtggatcaatctcaagaccgactcgaaacacctgttcgcctataccaacgaggtcgttcgccgctacacccttccctgcgaggtttcgaatcccgacatctacggttcggggtatgccgacgaggtgctttcggtcaaaacggcctacgagaaacgttttctcgaaatgggtcttccgatcacctatacccgcttttcgctggccggacggcaggaattcccgtggttcgactgggaagaggacgaaaaggaggaaaaggacaacgagcaggagcgccggatacactgaccccgcttccagcctgacggcccgcctatcctttatacagccgctcttttcttaattaaatataggtaagaaactttttcggctcaatctactaattttttagatataaaacttgcatatctaaaaaattagtagtaaacttgcataggaactgaaaaagcgctttttaccatggagaaaaaatcaacggaactcacacgcggcgaagaggagatcatgcagatactctggcgtctgggggacgcggtggtcaatgagatcatcgcccagaccgaggagccgcggcccaagtacaccaccgtcgccaccttcctcaagattctggaaaacaaaggtttcgtgggacacacccccgaaggcaaaagccaccgctactacccgctcgtcggccgcgagcagtacgcgcgcggggtcatgtcgtcggtgctgacctcctatttcgacggctcgctggcccggatggtgtcgtttttctcgcggaacgaagacatttcggtcaaggagatggacgagattctcgaaatcatgcggaacgcaaaaaaataacgcgctatgaaacggcttctgctcttcctgattctcctgctgggccacgcggcccgcagcaaagggcagacctccggtccgccgcaggacggcatgcggcacgctgccgaaacaacttccgagacgaatgaaacacaccggtgcggcggcattcaggccgcggcaatacgaccgtcaaaacacaccgcagccgtcgctgccgcagcgcccacccgataaaccgccagccgcagcgacacgcccgaaaacagcgtacgccaaccgacgataaacgcccgaaacacaagcacacgaccagtcaaatcactgacaatgaaacccgcaatcatctacatgctcgaagtgctcgtctgcagcggagtcctgctggcggcctacgccatcctgctcgaacgccgggtaaaattccgctggtgccggctctacctgctcctgacgaccttcgccgcggccctgattccgctgctgcggattcctgtatggccggggcgcatcgtcgcagccgcacccgccatcccgcccgacctccccgtctggatgggcgaagtgcttcccgacgagggcggaagtttcgccgtaacgcccgaaattttctgtctggggctttatctgctgggagcggtcctgatcgccggcgtcatggcatggcaggtcttccgcatccataggctgcggcgcggcgccgaaatttcccggaccggcgactatacgctcgtccgcacgcggcaggaaatcgcttcgttctccttcctgcgcaccatttacgtctgggacaaaacgcctgccggggagctggccgccattctggcccacgagtcgagccacatcgcccaccgccactccatcgaacgcatcctgatggagctgatgaaggcccttctatggtggaatcccttcgcatggatcgccgcacggcggctgaccgaggccgaagagttcgaggccgacaacgacgtgctgagcagcggttacgaccgcgccgaatatatgcaaaccatcttcaggcagcttttcggttatagtccggaaatagccaacgggctgcgcaactccctcactaaaaaacgctttaaaatgatgaccaagcagacaaagagcaggcacggcctgctgcggctggcgggtacgttgcccgccgtgataggattgttgtgcgcattcggcttcacctcgcgcgcagctgtgatcgtcgccccggcgaccgcccccgcaaccggaacgaccgaagagccggccgacatacgaaccgcggccgacgcgatgcagaagcaggacaagacctgcacggcgacgctatcggtagtggataaaaaagacaaacaccccatcgaaggagcgctcgtacaggcggccggccccccaaaaggcaccgtcaccggcaaagacggccgggccgtgataacggtccccgaaggcagtgaactcaaaatcagctatatcggctacgagccccggaccatcgccgtaaacgacgaaaacccggtcgtcgtatccctgatacgaaaccccaaagcaggctttacccccaccgacgacctgcccgacacgccgcaggagcaacagcaggagcaggtgaccgtcagcgtcgccacctacaaggacaacgccccgctcgccggtgcgctggtcaaggtcagcggttcgcagataggtgcggtcaccaacgacgaaggcttggccgcattacaggtaccggccaattcggctcttgaaatcagctacataggatgcaaaccgcatatcgcacaagtcggcgacaaggcgcgtcagatgttcatgttcgacatgcagcccgcaacgtccggaagatccgaaacggagggcacgaccgtaacaacgaccgtaacggacaaaccgctctatatcgtcaacggaatcgaaacgaaggagatcggcaaactcgatcccgaccggatcgagagcatgagtgtcctcaaggacaaggccgccaccgcactctacggcgaaaaggcccgcaacggcgtgatagtcatcacgctcaaaggagcggatatagaacctgctacgtccgaaagcaacggcaagagggatgacgccgaacaaaccgcggcaaacgccatcgcgattaaaaacggcacccccgaaaaggaagaggcgttccttgtgaccgaaacgatgcctctcttcccgaccgaagatcccgccgccccgtacggcgacctcggcaacttccgggcatgggtgcagaaaaacgtaaagtacccggccgaagctttcgaaaaggggatcggaggacgtgtcgtgctgtcgttcgtcgtcgagaaggacggctcggtaagcagcatcgaaaagctccaatcgcccgacgcgtcgctttgggaggaggctcgccgcgtcatcgcctcttcgcccaagtggaaacccggcgaacagcgcggacagatcgtgcgcgtgaaatatacgctccccgtggacttccgtcttacgaaagcgtcagatacgccggccccggaatccggaaagtagtttttcaaccggctccgaccaagcagactgcgcggcgccataacccggattccccaaaccgatcggcccggattccccgaatcaaccggctccacgaatcggccgcccggcctgcttttcccaagccaagatcccgcggaccggcatccgatccggattttcaagcccccgccggcagtcctcagagactgccccggctttcccaagccaccgaaccgaccataagcggaaacggcgtccaccctgagttcagtggacgccgtttttatcggcctgccggaccgccgaatagcgatacctgcgagaccgccccggccgctccggacttttcagccctatctccgaacggctctgcgactccgccgctccggattactccctgcaacagcgaacgttatagccgtatgccgcatcggatttcgaagaagactgcggctggagcagtttgcccgtactgagctttttcgaaatatagaaacaagagatcgtgtttcccgaacgatagttggaccagtaatgccccgtacgggtcgtagcgagaccggcgagattgcccttgtcgcggttacggtaacccgatgtcgggtaccagtccctcagatcgccgaaaatgtaggtcatgccgtacttctccccatcccattccgaggttccgtccacatagcggtcctgatcgtccgcaaaatcgtcccacgtatcgcggtccggcaccttataccccacggggcacggatcgtagcaggttttcgcggtattccacaaatcggcgcggggcttggccagccagtcgtaaactccggtcgcacccttgttcgaaaggaacgaaagcggatgcgccgcggcgtattccagtgtcgaaacggccgccccgctctcctgcttccacgcatgcgtatcggcgaaggccggattgacgaccgaatttttcgccgcctgcgcaaaagcagtcgccgaggtttcgggggccgtacccccgcagaacgggtccttgcggccccactggtaatagagtccgtaagcctcggccgatccgggcgtcgtgccgacggctcccagcgaacggtccaacaatacgcggccgttggcataggtcaccctccgaggttccggcgtgaaccagagatgccagctccacacgatctcccccgcggcatccgcaagcgcgatgacggcattgcccttcgcggcgcctgccgccgtaaagaagatgcggccttttccggcatcgagcgaaaccgccgaaatctcctgctccagccctttcgtcacccaaagccagtcagctttcatgccgtcggcaagcgcgatcgcggcatcgtctccgctgccgttgccacgcaccgcagcgtcgaacatataatcgccggcctcgctgacgatatagcagttggcggttccgtcccggctcaggtcgatggccgtcaccggcgcctgcacggccgtcaatgtcggcgtagtcgcactccacggcttgccgttgcggtcggtgacggtcagcgtcacggccgtttccgacggagttgcggacgccgtaacatcgagcgcgcctgcgtaggcatccccctcgcgcccggcagagacgacaaccgtccaaccggagagggcctcatcaggctcggcggcgaaagtcagcccctccagatcgtcgcccgtcaccgtgaaggcgagccgcttctgctccccgaccgtaaattcgacgggattctccccggcgaacgagattttcagttcgaccggtttctgttccggttcgttgtcgttacagcccgatgcaaacagggccagcaaacatcctaagatcagttttttcatcttttatccgtttttggttgaacactgttccgttccggcggaccgcaaagatgaaaaggcacactccgacgcacacgcaacaaagcgcgcgcagtccggcatccgaggttgttttcgacacactcaatacgttcggttgaaaatgacccaagacctgctccattcaccgtagaagcgaaatccgtataatcgcgacggcaggtcttctgactcgcccttctctccggcgccttcccggtccgcggaggaccagtggccaagaatgccggaaaatactttcaatcaagaaagccgggcacacagcaacgggaattgttaccgattctcacggtattcccttttaattcccggcgaccgcaaagggaccgggaaaccgtagcgaaagcaaaggtagcacaatccctcaaataaacaaaaaaaacgcagccggaattcgggttgcggcacaaatcccctccgtaccgtcagccgccgggtccgagcggcgccatgatccgccggacctgtccggtgttgtccatcacgccgcagcggagtccggcacgcggttgtcggccggcgggtccgaatcagggccgcgccctgcgcacggtcgaatgccttcggtacgtaaccgcccccgatcaccggcatcgagacctgcgtcagccccaagccgtcgccgatcatataaatcagcgtcacggcccctttcggcggtttttccgcatccgcgcacgcgcagtcagcaggcaaagcgcaaaaaacaaaacccctttccttatatcggcagcgaaaacaactggaatttgccgactttttactacatttacaccactttaacacaccttgcaacatggatgtaaagatcgcccccgactggaaagagctgctcgctcccgaattcgaaaaaccctacttcgccgacctcacgcagttcgtacggcaggaatacgccacgcggcgcatctatccgcgcggcagcaacatcttccgcgccttcgacaaatgcccgttcgacaagctgaaagtggtcatcatcggtcaggacccctaccacggtcccggacaggccaacgggctctgcttctcggtaggcgacggcgtgccgttcccgccctcgctgcagaatatcttcaaggaggtcgccgacgacaccgggacgccccctcccgcgacgggcaacctcgaccgctgggccgagcagggcgtactgctgctgaacgccgtgctgaccgtccgcgcacacgaagcggcgtcgcatgcgggccgcggctgggaaaccttcaccgacgccgtggtacgcgcgatctccgaacgcaaacagggcgtcgtatacatgctttggggcagttacgcccagaaaaagggagctatcgcagacccgcagcggaatttcatcctcaagtccgtacacccgtcgccgctctcggtctaccgcggatttttcggctgccgccacttctcgcgcgccaacgaatatctccgcagcatcggcaaggagccgatcgtatggtgaaccgtcgcctgccggtccggtcttgccggtcgtcttatcggtcgtcgtatcggtcggaagtttccgccacctcaggcggcgcggggacttcggcctgcgccaatccgggatcgtctgactacgccctgccccggaaggagccgcaaaacggttatccgcccaaacaatacagcaataaaaccacacgcagcgcataagtccgctccggaaacatgaaaacacaaacagccaccaattcgtttcgggcatggatgctcgcggcgcggcccaagacgctgacgggagccgccgtaccggtgatgctgggctgcgctttagccgcttcggacggagattttcacctgctgcccgccgtgctgtgcctgctgttcgccttcctgatgcagatcgacgccaacctcatcaacgacctctgggattacctcaaaggctccgacggcaaagaccggctgggacccgaacgggcctgcgcgcagggctggatcacaccccgcgccatgcgtcgcggaatcgccctgacgaccgcggccgcctgcatcacgggctgcggactgctcttttacggcggctggtggctgatcgccgtcggcgcgctgtgcgtcgtgttcgcattcctctacacggcgggaccctatccgctggcctatcacggctggggcgacctgctggtgctggctttcttcggattcgtccccgtcggctgtacctgttgcatcctcagcggcagctggacatggcagacgggcgtcatttcggcggcctgcggactggcgatcgacaccctgctgatggtcaacaactaccgcgaccgcgagcaggacgcccgcagcggcaaacgcacgctcgtcgtccggctgggcgcacgggccggcagcgggctttatctggcactgggattcgcagccgcagcgctctgcctcccgctgctctgcgacggccgcataggagcggcagcgcttcccctgctctacctcgcaccgcacacggcgacatggcggcgcatggtgcggatcagccgcggccgggagctgaacgccattctgggcgccacgtcgcgcaacatcctgctcttcggaatactgctctcgatcgggctgctgctgtaaagacggtcccgaagcgcacacagcgcaacccgcggccccgaagcgcacccccacacaccacgcaccaatagcatcgccgcaccgaaacgcatacggcaggccagccgctcacaacagcactaaacaaaaaaaagccgtcatttttgacagctttttcactcacacgacccgaccgggccggatatgtcgccgggcgtcagcccagatacgatttcagcagtttgctgcgcgacgagtggcgcaggcggcggatcgccttctccttgatctggcgcacgcgctcgcgcgtcaggtcgaacttctcaccgatctcttcgagggtcatctccgaagtgccgatgccgaagaagtacttgatgatgtcgcgttcgcggtccgtgagggtttccaacgcgcggtccacctcggtcgagagcgactcgttgataagtccgcggtcggcgttgggcgaatcgggattgaccagcacgtccagcagcgagttgtcctcgccgtcggcgaacggggcgtccaccgagacgtggcggcctgccacgcgcagcgtgtcggtgaccttctccttgggaagctccagctccgtggccagctcttcgggcgacggggtgcgctcgtgctcctgctcgaagcgtgcgaacgccttgttgatcttgttgagcgaacccacctgattgagcggcagacgcacgatgcgcgactgttcggccaatgcctgcaggatcgactgacggatccaccacacggcgtacgagatgaacttgaaaccgcgggtctcgtcgaacttctcggcggccttgatcagaccgaggttgccttcgttgatcaggtccgggaggctgagtccctgattctgatattgtttggcgacggaaaccacgaaacgcaggttggctttggtcagcttttcgagggcttcctgatctcctttcttaatccgttgggcgagctccacctcctcttcgaccgtgataagctcctccttgccgatttcctgcaagtatttgtccagcgaagcgctctcgcggttggtgatggattttgtaatctttaattgacgcatatatctattaaccttcctaaataaaattctacattacaacccgcccggaccgcactactccacgagcgtgtagctcgcagcgcggccgttgggataaataccgtcgatcgagcggaccttctcgtccatacgctgcatgtccgcaaccgaatagaccggacgatcgttgatatgggtaatcacaaatccctgtttgacacgggcacgggccagaattccgtcggccttgatgccgaccacctgcacgccgcccttgatatcgagctcacggcagagtttggtgcccgcatcggcgaacttaccgccgagaacctcgacgacatcgacgtcctctttggtcattaattccgttttacccgctttattacgcaaagtaacctcgatttgtttcactgcgccatctctttttaccgacaatttgaccttatcgttgggtcggcggcgtccgatctgctcggaaagggtcgcattgtcgttgatcttcaccccgtcgatgtccagaatcacgtcgcccttgcggatgccggcctccgaagccgaaccgccctcgactacgccggcgacataggcgccgcccagctcggtgatgcccagttccttgccttcacggtcgataaagtcctgatcgacaatcgcaaaacggatgccgagcagtgcgcgctgcacgatgccgaactccttgaggtccacgaccaccttgcgcacgatcgattcgggaatggcgaacgaataaccgatatagctgcccgtctgcgacttgatgagggtgttgatgcccaccagctcgccgtgcgtgttgaccagcgcgccgcccgaattgccgggattcacggccgcgtcggtctggataaaggcctcgatgcggaaatcgttgggaataacccccagattacgcgccttggcgctcacgatacccgccgtaatggtcgattgcaggtcgaacggcgaaccgatcgccagcacccactcgcccagacgcagcgcatcggacgatccgaaagccagcgtcggcaggtccgaagcctcgatcttcagcagcgcgaggtccgtggccgagtccttgccgatcagcttggcgtcgaacgaacggccgtcgttgagcttcacgcggagtttcgaagccccgtccacgacgtggttgttggtcaccacgtaaccgtcggccgagatgatgacgcccgaacctccggcgcgctgttcgcggaactgcggtccctcgtcatacccctgcgggatgccgaagaactccagaaagggatcgtacccccggcggcgcggcatctcgacctgctgcacggcttcgatattgaccacggccttcaccgcattctcggcggcgtacgtcaggtcggggtactgctcggcctgatacgaggtgaactgcgtccccagcgcgggcgtgcgttccacctcgcgctcgatatattgtacggagccttcgcggcccccggctactgcccatgccgtaagtccgcccgcggcggccgatacggcgactgctcctaaaatcaaaaatgcctttttcataattcgataacaagtgtttaaattcaattaatcggaggcaatttataccataagcttcatcaggttttattacgattcgtaggacaaacggacggaaacgtccggttagtatgcccgtaggaacaaaaatcgggacgtccgcgacggacatcccgattttctgcaacccggaccgttacaatccgaactctttgcgaatcagctccacggcatcgagcttctcccagccgaagaactcgatctcacgctccgtttcgcggccgttctcccagaccttcacccgctccgtatagggacggttgccgaagtgaccgtaggaagccgtggcctcgaagatcgggttcttcaggccgaaacggcggacgatggcggcgggacgcaggtcgaaaagcttgccgatgcggcgggcgatctcgccgtcggtcatgccctccagcgcggcgggacgcggcgaacggtaggtatcgacgtaaatcgacagcggctgcgcgatgccgatggcgtacgacagctcgaccagcacttcgtcggcaacgcccgcggcgaccagattcttggcgatatggcgggcggcgtaggccgccgagcggtccaccttcgaggagtccttgcccgaaaaggcgccgccgccgtgcgcgccgcggccgccgtaggtatcgacgatgatcttgcggcccgtaagcccggtgtccccgtgagggccgccgatcacgaacttgcccgtaggattgacgtgcaggatatagtcgtcgccgatcagcccggccagcttgtcgccggcgcgctccagacgcgccttgacgcgcggaatgaggatcgtgcgcacgtcctcgcggatcgtagcctgcatccgctcctcggcctccttctccgtcagcccgttgccgggcaggatgaactcgtcgtgctgggtcgaaaccacgatggtatgcacgcgcagcggacggttggtcttctcgtcgtactcgatggtcacctgcgacttggaatcgggacgcaggtaggtcatcacctccccttcgcggcggatgacggccagctccttgagaatcacgtgcgagaggatcagcgtcgccggcatcatctcgcgggtctcgttgcaggcatagccgaacatgatgccctgatcgcccgcgccctgctcgtcctcctcggcgcgcacaacgccctgattgatgtccgacgactgctcgtggatggccgacaggatgccgcacgagttgcagtcgaactggtattcgctcttggtatagccgatgcggtcgatcacacggcgcgccacgccctgtacatcgacatacgcttcggagcgcacctcgcccgccacgaccaccagtcccgtggtgcaaagcgtctcgcaggcgactttcgagttggcgtcacgacgcaggaattcgtcgagaatggcgtctgaaatctgatctgaaactttatcgggatgtccttcggacaccgattccgatgtaaacaaaaagcccattgttatacattcaattatgagacggtaccctcagccgtaatgccggcatgcggaaacacgctctcggttaataaaaaaataaaacgtataaaatgggaaaaattggctgttggaataaaaaataagctgttttagcgattttttattgtggttgcaatcagtcaaatctttccacatttccccgcgttacggacgggagcgcaaagatacgaaggaatttcggaatatgcaaaaaacagttcgtttttgcctccgatatgcactatctttggcctggtattggatgagatgcgtcccggcaacccgcaaaacccgttttgcgattgcgcccgactttcgctatctttatacccgtcgaattcaacaaaccgtacatgaaacgattcttactcgccgcatgcatgcttctggccgccgtcagattttcgtcctgcgaaaacgacgacgacgatctctacgacacgctcacgggccgcgtatgggccggagacctcggattctaccaggacggctatgcgctggacagctatgtttacttcggggccgacggcttcggcagcgacgaactccgatacgccgacggcggacgggtcctcgacacgctcaacatccagtgggacgcctacgacgacgacacgatctacatcgactacggccgggtcgattccccgcgcgaactgcgccgggtccatatccgccgcggcacgctgaccgccgaactctacatcggcggccgctattacgaccggatcacgctctacatgcgctaacacggcggcacctattatatataacgatccccggattctgcgtgaatccggggatttccattattcattgagagtaacgcctgaaatataaccgtcctctatcccttccaaacatagatttaacttaaccataatacggttcaagcgttatgctgttacaaggatcgaccttttctacgcatgaaaaaaagccaagaatggcactatttgtagactcaactatgatcttcccccaagtattcagaccgggagcatggagcataactccatagacgcgatcccactccaagtagatattccctccaattgattcgcaagctcgtgatgcggaaactgtttgaggagtagcttttcccgtatcaattttaattataaatttcccggatcgggcggttccgtcagtattcgatttatcattatcgtttcctgtctttttcatattctgatccaaaatttcaaaatgatctgcttcgataatcgttccgtcggtaaactccactgatttcacttgtaactcatcggtagcggcagcatctgttgctgcataattttgcgcggaaatcaccgttccatcaacaagagtaacggatttgatccgcaaatcgcccgaatcctgagatttggcttcgaagggatatattataatcgaacatatcaccatcgcaataaatacatatgatttcatatcgttttttactcctttcattcatattaattatctaatttcttattttacctgccagaaaaccgcagatattttttgtcggaaaattcgcaaatcctccttgcgaaatagaaagtcattacagctgctgcatggacaatcctaattagttttcaattcacataggccctgatattatgaagacaattcaagcggtaatactcgatacgaaatttcacgcattgacagttacaaatatatatcaggcagaatttcagtacaatacctacatattgtcatatccaaaatataactacacaataattagtactccgatatatgaccttatacaacgatccccggattcacgcagaatccggggatcgttcgttagcgggcggcggccttgatccgtacgccggttatcgacctcaactcactcctccacgtcccgcagggcggcgcgcagggcgttgatatcgcccatcatccgcaggaagatacgcacgctgaggggcagtccgacgatcagtccggccacgaatccgtaaaacacatagggcgaggtcaggcttcccacgtaaaatcccagcgagatcagcagcggcacacccagcacgatgcccgcgcctacgccccagaggaagcaggtgcggaaccggagtacggcggcgcaggtttcgcgcacggtccccgctcccggctcgatccgcgccagcagcaccagcagcgcgatctgccgcgccagcatggcgaagataaagagcgccagcgtcgccttgacggccgttccgggatccgcctcgcccgtacgggatatattggcgaaacaaagcggcagcactgccagcagaaagattcccagccgtatcgtacgcgccagccgctgcttggccgagatgatctttccggccgagacctccgccgtcagccggtctattttagtgtccgcacacgacagacgtccgtccagctcgtgccatttggttttcagttcgtcgagttccatattcggggagtttaatgatttgcctgttcacgcagtttcagcttgatgcggtggagcttcgaagccacgttgttgcgcgtaagccccgtgatcgcggcgatctcctcgtaaggaagctcgtcgagccacagcatcacgaccgccttttcgagcgcatcgagccggtttatcagtgcatacagatcccgcagccgctcgccgcgttcgggatcttcgtcggctgcgcccagcgagtcggtcaacggcagccggcccgtatggcggcggttgcggcgatagtacgaaatgcaggtgttcagcgcgacgcggtagacccacgacgaaactttggcccggccttcgaatccgtcgaatccccgccacaggttaatcagcacctcctgatagagatcgtcgaagtcgtcgctgtccacggcatagagataacagactttgccgacgatgcggcggtgttcccggacgaaggtctcgaattcatactgtttggttcgctgtaggctcattgctgaaactgttttccccattagacgcggccggagccgaaaagttgcacggaggataaaataaacccatagcgaaaaagtaaatttgggcaaagcgtagcgaattagctgatatagcgttcgttacgctttgtctttctatggaacagagccaacgaaataccacctcgaagccaaacggtgcagaagttcagttaccacctcgttactcccgtaacgggtgcagatttctcgctaaatagttctgtttctgcgttttgcgtagatttacatagctgtcggtaactcactaataactaattttgtaaccaaaaaaaggagtgagttatgcgtagtacattcaaggtattattttacgtgaagaaaggcagcgagaagcccaacggcaacctgcctctgatgtgccgtatcacggtggacggcgagattaaacagttcagttgcaagatggacgttcccccacgcttgtgggacgtgaagaacaaccgtgcttcgggcaagagcgtcgaagcacagagaatcaaccttgcggtggataaaatccgtgtggaggtgaaccgccgctaccaagaactgatgcagacggacggttatgttaccgccgccaagctcaaagacgcctatctcggtatcggcgtcaagcaggaaacattgctgaaactgttcgagcagcacaacgccgagtttgagaagaaagtcgggcacggcagggcgcagggtacatttacccgttatcggacggtctgcaaccatatccgggagtttctgccccatacctacaagcgtgaggatatcccgttaaaggaactcaacctcacgttcatcaacgacttcgagtattttttgcgcacggagaagaaatgccgcaccaataccgtgtggggctacatgattgtgttgaaacacatcgtttccattgcgaggaacgacgggcgtttgccctttaatccctttgccggatatatcaactctcccgaaagcgtggacaggggctaccttacccaaacggagatacagacgctcatgaacgcaccgatgaagaacgccacccatgaacttgtacgggatttgttcgtcttttctgttttcacgggtttggcgtattcggacgtgaagaacctcaccgccgaccgcctgcaaacattcttcgacggcaacctgtggataatcacccgaagaaagaagaccaacaccgaatcgaacatccgtcttttggacgttcccaaacgtatcatcgaaaagtacaagggactggctcgggacggtcacgttttccccgttccgagtaacggcagttgtaacaagatactcaaagatataggcagacaatgcggcttcaaggtgcgtttgacctaccatgtggcacgccacacgaacgccacgaccgtacttctgtcgcacggcgtacccatcgaaacggtgagccgccttttggggcacacgaacataaaaaccacccaaatttacgccaaaatcaccgcccaaaagataagccaagacatggaaaccttgtcgcacaagttggaggatatggagaagaatatctgccgagccatctaattaaaagcagaataccgatgaaagaagaaaggaacattatcacgatggacgagcggggcaatatctccctgccgagcgatataggcgcaaccgccatgaccgagcgggaaatctgcgaactgttcggggttatcgccccgacggttcgggcagggataaaagctctctgcaaaagcggagttttgaaagagtacggcataaaacgccttatccgcttaccggagagaagttacatcgaggtttacaacctcgaaacgatagccgccctcgctttccgtgtcgaatcgttcggggcggcgaaagtccgcagggcattattagagaggattatacacgggcgaaaagagaaaacgacggtattcgtgtcggttgtttcggacggcaagcccaacagcagttggaaagcatgatgatataccaacatatcaacataccaacatgcaaacgtaccagcataccagcatgcaaacctatcactatggtgatatatattgcagggtctattcctcttttcagaggaaagcggagcaatcatttccgtttacaaaggcaaagcaagcacggggctttacgtcggctaaaaggtcaggcggctgcgccgtttcccgataaatcttcctctcgcttcgctgcgagcgtatttatcgggaaaaccttgtatccgaccgccccgtgcaaaagagcctttgaaaacggaaacgaccgccccgccgcccaccgaccgaaagggaaaaaataaggtggggttatatgggtaagcagacggcagggacagccaccgcagaaaggcagacggacggcacgccgcagggtatttgcggagaaaataccgtagtttactaggctagggaatttgtccgagccgcaatactgtcgtatcgctgaaaattccccaataaggcaaggggcaagcccctctgcacaccccgtcggggacggcatttgccgccccgaagatacaaaaaatcattgtttcacaagccaaaaaagaaaggaagaatatatgggtttcgtagttttacacatggaaaaggcgcacggcagcgacagcggaacgaccgcacatatcgagcgtttcatcataccgaagaacgccgaccccacacgcacgcacctgaaccgcaggctcatcgaataccccgacggggtgaaagaccgttcggcggctatacagcagagactagaagaagcggggctgacacgcaaaatcggaagcaaccaagtgcgggcaatccgcatcaacgtgtcgggaacgcacgaggacatgaagcggatagaggaagaggggcgtttggacgagtggtgcgccgacaatctgaaatacttcgccgacacgttcggaaaggagaacatcgtggcggctcacctgcacagggacgagcagacgccacacatacacattacactcgttcccatcgtcaagggagagcgcaagcgcaggaaaagggaggaacagacgaagaaacgataccgcaagaagccgaccgacaccgtaaggctgtgcgccgacgatattatgacacggctgaaattgaagtcctaccaagatacctatgccgaagcgatggcgaaatacgggctgcaaagaggcatagacggctcgaaggctcgccacaagtccacgcagcagtattatcgggatatacagaaactcgccgacgacctcaaagcggaagtggtggatttgcaacagcagaaagaaacggcacgggaggaactaagacgggcgaaaaaagagatacagaccgagaagctgaaaggggcggcaaccaccgcagccgccaacatcgccgagagcgtcggttctcttttcggcagtaacaaggtcaagacgctggaaagggagaacaccgccctgcatagggaggtagccgaccacgaggaaaccatcgaagccctgcaagataggatacagaccatgcaagcagaccacagccgagagatacgggaaatacggcaggagcaccaaaaggagatagcggacaaggaagcgaggcacaagcaggaaatatcgtttctgaaaacggtaatcgcaaaggcggcggcatggtttccctacctgcgtgaaatgctccgtatcgaaaaattgtgccgccttgtcgggttcgatgaaaggcagaccgcaacgctcgtcagtggcaagccgttggagtatgcaggcgaactctactcggaggaacacggacggaaattcacgaccgaaagggcaggggttcaagtcgtgaaagaccccacggacgggactaaattggttcttgccatcaaccgaaagcccattgccgagtggttcaaggaacagttcgagaagttaaggcagaacatacggcaacctatacagcagcaaaggaaaagcaggggtatgaaactgtaaagctccaattttatacagcgagcaaataaatctattgcaacataagtgattatcacaacttttcactacctttgtggttggattagggaaactccgtccaagacatattagaaaagaaagaagcgttatgcttatcttgttgttgaaaacgtaggaaattttcaaaatgagcaaggatggcatagtggttctcacgctatagcgtgggctgctattactacatctgctcattaggtttttcctacgaccttcaacaaagacgtggcattgcagttccacgcttcgtggtttaataataaaaaggtcttaaggagctggaaagacaaacatagtactatggacatgacatctctttggggaagacttgcaaaattgcagagtttctttcaggatggtttgaatgtggatgaaaattcacatttgccagaagcggatttacgcaagataagtcttggcaatctgtatgtatatcaacaacaaggtgtattgaacacattcgaaactggcgtaactccctctgttcgtaaagttattttaggtgaatactttggtataacggatagggatagtgccatcgaaactttgaattggttgtcgcaagctccctcgcaaacaatgtttcactatgcttatacggcttttcttcaaggagggggtaatataagcaggaagtggcttaatgaaaatgaagaattgaaagaacacaccgatttccgaaatgactgtttggaaaagttggaaacgatggaggaaaaatatccggacattgaacaagctggaattgtcgcatccaaagaagaaatgggcaaactcggagtacttgcgtgggatgcaggaagattaaactttatcagcagactttgccttgagcaagagtacattgtaaaagaagaatgtatgcagtgtatcaatgccgcttacgagatgaccaaagaagtttataccaattggaaagactatgcttatagttatgttcttggtcgtactttgtcgatgggaactaccaacatgattggattggcagaagatttactgacagataccaaaagcccttggacttatataaaatggtgatattttattaaaaaacatttattaactctacatttttttttgaattatgaaaacgtttaattatgctccagcctctcctatcaaggataacattacaatgttggctgtatcagtcggtatggttgtcgtgccgctcgtttatccattcggtataagaataggcagtacccgaatacttggccctacgagtactgccattgtttttataatcggaggactcgttctcttggtaataacattgaacaaggttcgtcttgcccgtgctttggcggcgaacggaggaaaaatcgttgtcgatgcagatagtgtaacctatcctataataaagaaaggggagaaaaccgacaaaatatttaaaatatcggatataaaacatcttaaatatgacgatgaagaaggagaattggaaatcttcttgacggatgatacacaaataacattgcatgcaggattctttgaatctttcgagcgatacgaggaatttttcgctttgttgaagaagtgaagaggctaacaagttcgatttatgcggataatggcgtgtggctcaatcgcttttcgtggtgattgagccacgtgttagccgcaaccttgaaaaacaaaaaatacaatgaatagaatattggcactatacatctttttactattgtgtggcacggtttccgcacaacaaatcgtagaatggagcgatttgcagactataacagataactcacggcgcacggtctattataaaaaaggcagaaaacagccgttacggggaaaatatcgcattatacgaggacttgacgaggagtgtgttaaattttccgatggcatgataaacggtgattatcgccgctatcgtgatggggtgctgcgtgaatcgggtatatatgccaaaggcaagcgtaacagcacattcacggagtattaccaagacggcgttactccccgaaaggaaacacccatgcagcaaggcaagatagacggaactgtaaagacctattttcgtaacggcaaaatagaagccgaaaaggaatataagcagagtgtggagagcgggcgggaacgccgctttgacagcaagacaggagagcagatttttgaatctcattatatcgacgggaaaaaagatggcgaggagtgggaaatcttcgaggatgcgagcacgcttcgcagcaggataatacgccactaccgtaacggaaaacttgacggctcttatcgtgtggaatcgacacgggacggcaaaccctatataactatcgagggacaatacactgacggcgagaaatcggggcaatggatagaacataactatgataacaatacccaaacctgcacatggcatggtgaaggtggggcttaaacagagatgaagatagttatcataatactacttttaacgcttgcatcggtcgtaagctgcgagccacccatgccgccgacggacgaggaaatgatacgccacttcgccacgcacgaggcggcattcgacaagatacgcaaaatcatggcggagagttcggagggaagctttcactatccgccgctctctccctgcgatattctcatccttgattcggcagaacaaatatcctaccaaccgaaccaagtgcaggacacgccggtacacgggttatcaagatctgaccgaatacaactcgactccttgttgtcagagattggatgcggtcttgtccttgttgaccgcagggagcaggaaacggcagattcggtatatgtgagcttatttatgctgtactactcccacggcatcgtggatgcgggaacatccaagagtttcgtttacgatctcgaattgagaagccgccgtgacatccgtatcaccgaacacggcgacctgaacgaaatttaccgcaggacatacaatgacactacgctatacaagcccgtcaaggaaggctggtatatagagttagaccattcacgataattttcttttttcgcaagtcgattttataaaattgtcaccgaaagttcgtactttcggaaaaagatgttatatttgcaaatgaaagagttatttgacagcatagcaatgtaaaacgctgaaattcgcacagttgctaaatcgttacctctatttctcaaataattcgctaaaagtttatttctcaatcggttaagtcaaaccgagaaaaatctaaaataataatacaacgcaactcatccgacaaaaaaatccccgaagcgacacttcggggattttatccattatcgggtatcgttattttcagagcagcttcttgacctcttcggccggaagaatccgttgccgaagagtccaaacgtcccgactactttccgagcagcttcttaacctcttcggctacggtcttgccgttgtaaccgaatttctcgtcgagaaccgtatagggagccgaatagccgaagtgatccagaccgtggatcatacctttctcgcccacaagacccatcaggttcacaggaagtcccgatgtcaggccgtagcgcacgacgcccaccggaagcacgctctcctgatacgaacggggctggtcgcggaaaaggccctcgctcggcacgttcaccacccgaacggcgataccctcggcggcaagcagttcggcgccctcaacgagcgtcgagacctccgagccggtggcgaccatcacaacttcgggcttggccgagtcaagcaccacataaccgcccttggcgacctgtgcggcctcctcgcggcggctggcgcccagcgccggaaggctcttgatgttctgacgcgacagcaccagcgcaacgggccgctgctcctcgacggccagcttccacgccatgacggtttcatcgccgtcggccgggcgcagcacgaccatcgaacgttcgtcgtggtggtttcggaggtgttccatcaggcggatctgggcttcatgctcgatcggctggtgcgtaggaccgtcctcaccaacgcggaacgagtcgtgcgtccagatatagatcacgtgcaggcgcatcagcgccgaaagacgcactgccggtttcatgtagtccgagaagacgaagaacgtgccgcacgcaggaatcacacccccgtgcagcgccatgccgttggccacgcaggccatcgtcagttccgagactccagcctgaaagaatttgccgctgaagtcgcccttcgtgaaggccttggtcttcttgaggaagccgtccgtcttgtccgagttcgaaaggtccgcagaagccacgatcatgttctcgatcgtctcggcgaagacgcccagcaccgcagccgatgccgcgcgcgtcgccacgccggccttcacctcgatcgacttgtagtcgatttcgggcaggcgtcccgaaaggaacatatccagtttgcgggctagatcgccgtgttcggcgcgccacgtcttctcgacctcggcctgacgcgaggcccatgcgcgcaacgcttcgcggcgctcggagaacgcttcgcgactctcggagaaaacggcgaacggatcgttcggatccccgcccaaattcttcaccgtagcggcgaagtcggcaccggcggccgtaagcggctgcccgtgggtcgaaaccttgtcctcgaagctctcgccggcggggcctttggcgcccttgcccatgaccgtgcggccgatgatgagcgtaggacgctccgtctcggagttcgcggcaacgagcgcctcgcggatttcgttgatgttatgtccgtccactgacagcacgttccacccccacgcctcgtacttcatggccacgttctcggtcataacctcatccaccttcgtagaaagctggatgttgttcgagtcgtagtacatgatgaagttgctcaggcccagatggccggcgatacggcccacgccctgcgaaatctcctcctccacggcgccgtccgagatgtaggcgtaggtcttgtgcgccatccactcgccgaagcgggcagccatgaaccgttccgcgatggcggcgcccagcgccatggcatgaccctgtccgagagggccggaagtgttctcgacaccgcgcgcgaagtctgcttccgggtgacccggcgtcacgctgccccactgacgcagagactgaaggtcttcggtcgtatagtacccggcaagagaaagcgtagaatagagcatcggagacatgtggcccggatcgaggaagaaacgatcacggtaggggtaagacgtattgtccggatcgtaccgcagaaattcggtatagagcaccgtcatgaagtcggcgccgcccatagagccgccggggtgtcccgatttggctttttcgaccatggcggccgacaaaatgcggatattgtccgctacacgcgttagtttggaattggtagatgacatgagtatttaaagttttaaagtctttgtattaatcagcgtatcttctgccacaaaagtaataaaaaagatactacccaacttgtttaagctctaaaatatttgctttttctatctttttctttgcatatggcaacgtcacgacgaatttccgcgtgtcggtcgagggcaggtcgaacatcgtgtccatcatgatcgcctcgcagatcgaacgcaggccgcgggcgccgagtttgaactcgacggccttgtccacgatgtaatccagcaccgcgtcgtcgaacgtaagcttgacgttgtccagctcgaaaagccgcttgtactgcttgacgatggcgtttttcggttcggtgagaatcgaccgcaaggcttcgcgcgagaggggctgcatgtaggtcagcaccggaagacgccccaccagctccggaatcagtccgaacgacttgaggtcctgcggcgtgatgtactgcatcaggttgttgcggtcgatgcggtcggcgcggagccgtccgtaccccatggcgcgggtgttcagacgctgggcgatcttcttctccacgccgtcgaacgcgccgccgcagatgaagaggatgttgcgcgtatcgacctgaatgaatttctgttcggggtgcttgcgcccgccctgagggggcacgttgaccacggttccttcgagaatcttcagcagggcctgctgcacgccttcgcccgaaacgtcgcgcgtgatcgaagggttgtcgcccttgcgggcgatcttgtcaatctcgtcgatgaagacgatgccccgttcggcctgctcgacgttgtagtcggcgacctgcagcagccgcgaaaggatgctctcgacatcctcgcccacgtagcccgcctcggtcagcaccgtggcgtccacgatggtgaagggcaccttcagcagtttggcgatcgtgcgggccatcagcgtcttgcccgtacccgtgggtcccaccagcacgatattcgacttgtcgatctctacctcgtcctccttgggggcgtagagcagccgcttgtagtggttgtaaacggccacggccatataacgcttggcgtcgtcctgaccgatgacatactggtcgaggaaatccttgatctgggccggcttgagcagctcctccatcttgagcggcgcagcggcggcgctgccgccgcgctccgaagccacgtcgttctcgacgatgatccggtagccgttctcgatacatttgttgcagatgttggcgccgtcgatgccctgaaacatgatctccacgtcgctgcgcttggcgccgcagaacgagcagcagtcgccgcccgccccgttcttatggttgttgccttttcccgatgccattatttcccgcgtttggataatacttcgtcgatcagcccgtactccttggcttcgcgcgccgagagccagtagtcgcggtcggcgtccttctcgatcttcttgagcgcgacgcccgaatgggccgagagaatctcgtacagctcgcgtttggtcttcatgatctcgcgtgccgtgatttcgatgtccgaggcctgtccctgcgcaccgcccagcggctggtggatcatcacccgcgaatggggaagcgcagaacgcttgcccttggcgcccgccgtgagcagcacggcgcccatcgaagcggccagtcccgtgcagatggtcgccacgtcggaattgaccagctgcatcgtgtcataaatgcccagtccggccgaaaccgaaccgccgggcgagttgatatagatctgaatgtccttttcgggatcgaccgattcgaggaacagcagctgcgcctgaatgatattggccgcgtcgtcgtagatcggcgcgccgaggaagatgatgcggtccatcatcagccgcgagaagacgtccatcgtggcgatattcagctgacgctcttcgatgatcgtaggcgacacgtaggcgccgctgaccgactggaaatcgtgcagtttcagcgaactgatcccgcagtgtttccgtgcgtatttttcaaattctgacataataaattatcgtaattgttatcgttcgttatcgtttgtcgctatcgtttttaccgccggccggcagcccggcatctcttattcgcggcccacggccggctccgggcgggagctgcgggcggcggactgtcgccgaaacggcgtttaaagctgtatatcgtcaaacaaaaggactttgcaaacatcacgcctgcaaagtccaaagataatcttttttcggcaaatactaaagcgccttggccaatttggcgaaatcgtcggcagatacggctttttccgtcaccttgatcttcgacttcacatcctccacgaccttcacttcgtacagcttctcgtagatcttctgtccctgatccttgtcggcgagaatcttctcggcatagccggccagcatatcttcgggagccgacggcatgccgtactgcgcgaactgcgcggcggccagcgccttggcttccgcgagcgcctcgtccttggtcaccgtgatattgtcctgcttgatgaagtgcttctgcaggtagttccacgtgaacatcttcaggaactggtcgaagtccttgtcgatgtcctccatcgagaatttgccttcgttgatcgtatacagccagcgtttgaggaacgcttcgggcatcttcagaccggctttctgcaccagatagtcgcgcagctggagcgtgaagaggtagtcgctttcgcggcgcagctccggctcgatgcgcgcgtcgatgaacttgtcaagtccggcctcgtccttcacttcgccgccggggaatgccgtcttgaagaactcctcgttcagctcaggttcggcgaacttgcggatcttggtgatttcgagcgtaaattcgggtttgatgccctccagctcgttctccttgacctgcagcacggcggcgcgctgcgacgggttcttgtagagttcgttgacattgacttcggtcttgaagcccaccttcttgccgatgaaaggcttgcgctcctcctccgacatcgagatcaggcccacgtaagcgtccgccacgttcatctcgccgttgtcgagcgtgaccgacagcgcctcgtccgaagtcacctcgtcggcatcgaccagacggccgtactgacgcaggtagttggcgcggtagtcgtcgtgcatcttcttgtccaccttgatcttgctgtaggtcagcttatccttgtccgaaagttcgagttttatctcaggagcctcgccgatttcgaacacgaattcgaactccttgccgttctcgaaatcgaaatcgccctgctcttccgaaggaatcacgtcgcccaagtagtcgatgttctccttctggagatactcgaacaccgagttcgaggcggtgcggtaagcctgctcggccagcacgcccttgccgtacatcttcttgacgagacccatgggcaccatgccggggcggaaaccgggaatattggccttgcgcctgtattcgcgcaactctttctcgacggcttggccgtaatcctcttcgcccaccgttaccttgagcagcgaattgttctcttcgcgttgttctcttacgatcttcataatgaatgctttctatattgttattgtcttatttccgaaatcggctcgcaaagatagcgattttcgcggacaaaccaatattttttctaaaatatagtgtattgcagccggcggcggcaaactccgcaaaggctgttttcggaaaatgcgcaggcatccgaaaacgcgggtaaacgcaaagatagtcaaaaaattcgtcatatggcgggtttttcctatctttgcggaggataaacctccgctcagacaggcggcgtccggcccggccgaataaattcgcttccgtttccggctcgcgctgtctttgctgacgaattcacaagaaagagatgagaaagttcgctaccgttctgctgtcgggactgctgctggcttcgtgcggcggcaatcaggtccgggccaaacgccccgcggcgccggcggaacccaaggaatacacctacggcgtccgggcggtccacccgcacccggcgaccagctatacgcagggcctgcaatacgccgacggccgtttgtgggaaggcacgggccagcacggcgaatcggtcgtgcagacgctcgacctcgcgacgggccgcgcggaggtcttcgcacgtcttcccaaggaggacttcggcgaagggatcgccctcttggacggcaaggtctaccagctcacgtggcagtcgaacaaagcctatgtctacgacgcccggacgggagagaaaatcagggagttccgctatcccggcgagggctggggcctcacgaccgacgggaagaagctctacatgtcggacggcacggcaaacatctacacgctcgacccggccaccttcaaacgcgaaaagcgtaccacggtgacgctccggggcgagacgctcaacttcctcaacgagctggagtggatcgacggcaagatatgggccaacgtctacaccaccgaccaaatcgtcatcatcgacccggcgacgggcgcggtggaggggatcgtcgatctgacggggctgctgcccgaagaggacgtgaccccggcgaccgacgtgctcaacggcatcgcttacgacgcggccggagggcgcatcctcgtcacgggcaagaactggaacaaactgtttgaaatcgaaatcagagagaaataaatggccgacatatacgaacaactcgaatcccgcatcctgctgctcgacggcggtttcggcaccatggtccagcagtacggattcaccgaagaggactaccggggcgaacggttccgcgagtggcccgcgctgctcaaggggtgcaacgacctgctggccctgacgcggcccgaagcggtgcgcgaaatccacgtcaaatacctgcaggcgggggccgacatcatcgaaaccgactcgttcaatgccaacgccgtatcgctggccgattacggactggaggcgtacgcctacgaaatgtcgcgagcggcggcggccgtggcccgcagcgcggccgacgaattcacggcccgcaacccgcagaaaccccgcttcgtggcgggttcgatggggcccaccaaccgcacggcctcgatgtcggccgacgtggcgaaccccgcggcccgcgaagtgactttcgcacaactcgtcgaagcctacaccgatcaggcgcggggactgctggacggcggagccgacatcctgctggtcgagaccatcttcgacacgctcaacgccaaggcggccctctacgcgatcgacgcgctggccgaaaaactcggccgcacgatccgcgtcatggcgtcgggcacgctggccgacgccagcggccgcaccctgtcgggacagaccgtcgaggccttctgcacctcgctgtcgcacgcgcagctgctctccctcggcctgaactgcgcctacggagccaaacagctgctgccctacctcgaacggctggccgaaacggccccgttccgcatctcggcgcaccccaacgccggacttcccaacgtcatgggcggctacgacgagaccccggagatgttcgccgaggacgtgggcgaatacatgcgccgcggactggtcaatatcgtcggcggatgctgcggcacgacgcccgcgcatatcttcgaactttcgaaaatcgcctgcaactatgccccgcgccccgttccggcgccgcgccgcgtcacgacgctgagcggactggagccgctgcgcatcgcgcccgaaaccaatttcgtcaacgtcggcgagcgcaccaacgtcgcaggctcggccaaattcgcccgcctgatccgcgagggcaattacgaagaggccctgtcggtagcccgtgcgcaggtcgatgcgggggcgcagatcgtcgacgtctgcatggacgacggcatgatcgacggcgtcgaagccatgcgcacattcctcaacctgatggcctcggagccggaaatcgcccgcgtgccgacgatgatcgactcctcgaaatgggaggtgctcgcggcgggtctggaggtcacgcagggcaaggccgtggtcaattcgatctcgctcaaggagggcgaagccgaattcctgcgccgcgcacgggagatacaccgctacggagccgccgcggtggtgatgctcttcgacgagcagggacaggccgacacctgcgagcgcaagatcgaggtggcctcacgcgcctaccgcctgctgaccgacgcgggattccccgccgaagacatcatcttcgaccccaacatactggccgtggcgacgggaattcccgaacacgacggctacgccaaagcctttatcgacgcgacgcgctggatcaaggaaaacctgccttacgcaaaggtgtcgggcggcgtgtcgaacctctcgttcgccttccgcggcaacaacgccgtgcgcgaagcgatgcactcggcgttcctctaccacgccatccgcgcgggcatggacatgggcatcgtcaacccgcaaatggtgaagatatacagcgagatcgaacccgaactgctccaacgcgtcgaggacgtgatcctctgccgccgggccgacgccgccgaacggctcaccgaatatgcgcagcaggtgcgcaccacggccgaaacccagccgcaggcccccgacgcatggcgcgcgggaacgctcgccgagcggatcggccacgccatgctcaagggcgtagcggactacatcgagcaggacgcgctggagggctacgaagccctcggaacgccgatggccgtgatcgacaccctgctgatgcccgccatggagcgggtcggcacgctcttcggcgagggtaagatgttcctgccgcaggtcgtgaagaccgcccgcgtgatgaagcgcgccgtagcggccctgaccccctacatcgagcaaggcggcgcccagaccccgcacaacgcgggcaaggtgctgatcgccacggtcaaaggcgacgtacacgacatcggcaagaatatcgtggcagtcgtgatggcctgcaacggatacgagataaaggacctcggcgtgatggtcgagtcgcagcggatcgtcgaagaggccgtagcgtggggcgccgactgcatctgcctgagcggcctgatcaccccgtcgctcgacgagatggcccacgtctgcgaggagctggaacgccgcgcactgcgccttccggtcatcatcggcggcgcgacgacctcgaacctgcataccgccgtgaagatcgccccggtctattcgggattggtgatacactcgcccaacgccagccgcaacagccagattctggcgcagctgctcggtcccgacggccagctgtacgccgacaaggtccgcgccgaccagcaggcgctgcgcagcgactacctgcgcgccgaacgcacccggaacctgattccgatcgtcgaggtccgcaagacccgcaaaggcgccgccccgcacctgcccgtcgagccgctgcaccccggccgcatggtcttccccgacttcgacgtcgccgacgccgaaccctatatcgactggagcttcttcttcgcggcatggggtctcaagggacgctatcccgaaatcctcgaccaccccgaaaaaggcgccgaagcgcgcaaggtcttcgccgacgccgaggccctgctggcccgcatccgcgacgagcggctgctcacgctgcaggccgccgtggggatcttcccggcgcgcgcagagggcgacgacatctggatcaccgaccagaaaggccgcgaacgccggctggcgatgctccgcaaccagacgcgcggggaggagaaccgctcgctggcggactgcatcgcgccgcagggcgactggatcggctgtttcgccgtcaccgccggcatcggactcagggagctctgcgaaaaattccgcgccgagggcgacgactacggcgccatcatggccaaactgctggccgaccggctgaccgaagccttcgccgaagccgtgcacacgttcgtgcggcgacagatgtggggttacgaaacgggcgagccgctcacgccgcagcagaccgtccgcggccagtaccgcggccgccgcatggccttcggctatcccgcgtcgcccgaccattcgctcaagcgcgaggtcttcgacctgctgtcggtcgaaatgacgacgggcatgaagctcaccgagaattacatgatcgatcccggcgaagcgctctgcggactgatgttcgccgacgccgactacttctccgtgggcacgatcgacaccaagcagctgctcgactacgcccggcggcgcggcatggaggtcgaagagatcaagaaactgatacccaataatatttaacgcgcgggaacgccccggcggccccgcccgccgaaccaaagcaacaacagaccgaaccatgaatgttctggacataatcaatacggccatcgccgaacaccgcacgcgcttcgcgttcgaactgctcccgcccctcaagggcgacggcatgggcggcgtattcgcggccatcgaccggctcatcggattcgacccggcctacatcaacgtcaccttccaccgcgagggaatcaagcagtccgtgcgtccggacggaggcatcgactggcacgtggtgcgccgccgtcccggcacggtgggcatctcggccgccattcagaagaagtacggcgtcgaagtcgtgccgcacctgatctgcggcggacagtcgaaatacgacatcgaggacgcgctgatcgacctcgacttcctcggcctgcacaacgtactggcgctcaggggagacaagtcgcagaacgaaaagttcttcatgccccacccgcagggccattcgcacgccgtggacctcgtgcggcagatcgcggccatgaaccgcggcgaattcgtggacggcgaggtcgaggagtgccaccactcgaaattctcgatcggcgtggccggctaccccgaagggcacgaagagtccccctcgcccgaagccgacatcgccgccctcaaggcgaagatcgatgccggagccgggtacatcgtcacgcagctcttctacgacaacgcccgctttttcgacttcgtgcgccgctgccgcgaagcgggcatcgcggtgccgatcatccccggcatcaaacccctctcgacgctgcgccacctgacgctgctgccgcagaccttcggctgccgcattcccgaagagctggaacgcgaagtcctgcgccaccgggaggacccgaaggcgatccgcgaagtcggcaccgaatgggccgtcgcccagagccgggagctgaaacaggccggagtccccgtactgcactactacccgatgggcaaggccgacaatatcatcaagatagcaaaagcgatattttaactgaaatgaatcccatccaattccgccgtcacctgcacatgcaccccgaactgtcgttcagggagcacgacacggcggcctttatctccgcccggctctcggagctgggcatcgagcaccgtcccatagccggaacgggcgtgctggctaagatcgaaggccgcggcaaagccgaccccaaacgccgggccgtggtactgcgcgccgacatcgacgccctgccgatcgacgagcggaacgacgcagactggagctcccgcaaccaaggggtcatgcacgcctgcggccacgacatgcacgccgcggtgctgttcggcgtgttgcagcagctggccgccgagccggatttccgcggcacgatcttcgggctgttccagccgggcgaggagtgcaatccgggcggtgcgtcgctggtgctggccgaaaatccgttcgaaggctacgacgtccgggccgtggtcggcgaacacgtcgagccgcagctcgaagtcgggacgctcggattccgcgccggcaaatacatggccgcaagcgacgaactgcgcttcacggtgcacgggacgggcggtcacggggccatgcgcccgcagctcaaggatccggtggcggccgccgcggagttcgtgacgcggctcgtggcgctcaaccacgaagagtgcgtgctctcgatcggccgcgtggaggccgggggcgccacgaacatcgtgcccgatcaggtctatctcgaaggcacgctccgcaccttcgacgaacgcgagcgcgaaatcatccacaaacgcatccgcaacttcgccgcggacatcgacaagcgccacggcgtgcggaccgacgtcgatatcagccggggctacccctgcgtggtgaacgacgccgcgctggtcaagcatgcggcggcgctggccgcggaagccgggctgcgggtcgaaatgctgccgctgcgcaccacggcggaggatttcggcttctactgtaccaaatatccgtcgctgttctaccggctgggcgtgggcgccgcggccggacggccccatacggcgacgttcaaccccgacgaaggggccatcgacacgggcatagactacatgaaacgtctcgccctccaaattttgaagaaatgaaaaagcaatcacaaaagaaccgtcccgcaaggggcgcgaaaaacacggaccgggcggcagtcatcctgagtctcttccgtgaattccccaataataaattctcgctcaaacacctcgcgtcggcttcgggcggcgcgacgaaagagggacgccgcgagacgttcgaaatactgggacgcctgcacgacgaaggcatcgtcgaggagtgcgcccgcgagaaataccggctcacgcacaagcacctgccccacttcgaaggcatcgccgacatgacggcgagcggttcgatatacgtacgggtcgagggcgaggagaacgatattttcgtcaaccagcgcaacacggccaacgccctgaacggcgaccgcgtggaggtggtggccatccaccgcggccgcgacgggaaattcgaaggcgaaatcacgcgcatcgtcgagcgcagccgcaaaccctatgtcggcgtggccgaggtgggcgcgcaccagatcttcgtgcgggccgactcgcgccgcatgccgatggacatctacctctcgaaaaagcaataccccgacgtgaaggacggcgaaaaggtcgtggtccgcatcgccgactgggccgaaggcagcaaaagccccgtgggcgagctggtcgaacggctcggcatggcaggcaacaacgacacggagatgcacgccattctggccgaatacgagctgccctaccgcttcgaccccgaaatcgagcaggcagcggaggccatcgacggcagcatcaccgccaaggagatcgccgcacgccgcgacttcaggcaggtgacgaccttcacggtagacccggccgacgccaaggacttcgacgacgcgctttcggtgcgcagggtccgggacggcgtctgggagatcggcgtgcatatcgccgacgtgacccactacgtgcgcccccaatcgacgatcgacgacgaagccgtcgaacgcggcacctcggtctatctggtggaccgcaccgtgccgatgctgcccgaacggctttcgaacgagctttgttcgctccgcccgcacgaaacgagtctctgtttctcggcggtcttcaccctcaacgagaacctcgacatcctcgaagagtggttcggccgcacggtgatctactccgaccgccgcttcacctatgccgaggcgcaggaggtgatcgagacgggccgcggcgactatgccgaagagatcctgacgctcaacaggctggcgcaggcgcttcgccggcaacggttcaagaacggcgcgatcagcttcgaccgcgaagaggtgaaattcaaactcgacgagacaggcaaaccgctgggcgtctatttcaaggagcagaaggaatcgaaccagatgatcgaggagttcatgctgctggccaaccgccgcgtcgcggagttctgcggcaagcgcaagaccgacaagggccgcaccgtcgaacgtccgatggtttaccgcgtccacgactcgccgagcgaggagaagctggaccgcttccggcagttcatcctccgcttcggacatatcttcaaggccaccaagggccgcgccatagccaaggagctgaacaagcttttcgcccagatcaagggcacgaccgaggagaacgccgtatcgacgatggccgtgcggtcgatggccaaggcgtattacacgaccgacaacatcggccactacggactggcattcccctattacacgcacttcacctcgcccatccgccgctaccccgacatgatggtccaccgcctgctggcgcgctatctcgccgacggcaaggcggccgacaaggcgatgctcgaagatttgtgcttccgcgcttcggaacgcgaagtcatcgccgccgaagccgagcgcgcgtcgatcaagtacaagatggtcgaattcatgaaggagcgcatcggcgaagagttcgaaggacatatttcgggactcaccgagtggggtatctatgtcgagctggacgaaacccacatcgagggcatgtcgttcctgcgcgacatcgacggcgacttcttccagttcgacgaggccaactaccagatcatcggccgctcgacaggccgccgcatgacgctgggcgacgccgtgcgcatccgcgtcaaacgcgccgacctgcagaaacgccagctcgatttcgaggtgctgctcgacggactccgcacccctgcgcccgccgaagggcagggaccgcaggtacgccgcagcaaccgacgcaaaaaccgataggccgtgcagcgcatctacgacaaatgccggcggcgggagccgctctcgcgcgaagaagcctaccggctctacgacgaagccccgctgcaggagctggcgctggtggccgacgaggtgcgccgcgccgtggttcccgatcctcaggtcgtgacgtggcagatcgaccgcaacgtcaacatcaccaacgtctgcatttcaggctgcaagttctgcaacttccactgcaaaccccaccagaccgaccgggcgttcatcaccacgctggagcagtactgcgagaaaatcgaccgtacgctccgtctgggcggcgaccagctgctgttgcagggcggcctgcaccccggactgaaaatcgacttctacgaacggctgttcagcgggttgaaatcgcgctacccttcgctgcggctgcatgcgctgggcgcgcccgaagtggcgcatatcgcccgcataagcgggctgacgacgctcgaaaccctgcgccgcctgatggccgcgggactggattcgctgccgggcgcaggagccgagatactcgattcagacgtgcgccgggccatctcccccgccaaaccttcggtcgagaagtggctcgacgtgatgcacgaagcccactgcctgaatctgccgacctcggcgacgatgatgtacgggcacgtcgagacgccgcaccagcgcatcgaccacctgctgcgcatccgcgacctgcagacccgctgtcccgaaggcaattacggcttcatcgccttcatcccgtggattttccgttcgacgggcaccgagctggaacggcagggcgtggaaacccgcttttcgccgctcgaatacctgcgcatcatcgccgtgagccggctgatgctgcacaatatccccaacattcaggcttcgtggctcaccgtgggcaaagccacggcgcaggctgccctgcacagcggagccaacgacatggggtcgatcatgatcgaagagaacgtcgtatcgtcggccggggcgcacaacagtttcgacgccgaaggcattcagtccgccatccgcgaagcgggcttcatcccgcgcctgcgggaccagctctaccggatgcgggaatatgcgccgcaaaccggggaacttgcgacatcgcttcaagacgcctaacggcgcatcatgccgcaatgcccaagtgcacgcctgcaaaacgagttttcgcaaacgcacacgctgcaaagaaaaaggagatgccgaaaagcatctcctttttcataatccacgtctccggacacggagccaaagtcccgcagccgccataagcccaagagcaggaaagggttgaaaaatcccgccccgctactcgatcacggccgcccagccgccgttgcgcaccatctccaccttcacgacggtcgaagcgtccaccttacgcacccgttttctgtagtccgtggcctgcaggtcggcgttcaccccgtcctcgaacgaagtcatcgtaaaggtacggcccgcaggcaggaagtcgagcgcgatttcggtcgtataggggcggtcgttcgtaatgccgcccacgtaccacttgtcgcccttgcggcgcgccacgacgacctcccggccgcatgcggcgtgcaggacgcgcaggctgtcccacgtggtgggaaccgcggcgagaaactccgtgcagggatgctcgcggcggtagagcaccggattgtcggcgagcatctgcagcgggctttcgaaaaccacgtagagcgccatctggtaggcgcgcgtacccgttcccatcggattggcctccgtcgaacggttgtcctcaggctgcgccgagaacatcgagccgggcgtgaagtccatcggtccgacggcattgcggataaagggcagccagttgctgttttcgggcttgcagcgggccccctgctccatgccgagcaccccctcgtaggtgagcaggttgggataggtgcggtaaagccccttgggtgtataggagccgtgcatatcgacgaaaaggcggtgccgggcggcgcacttcatcacccgttcgtaatagccgaccatccactggtcgctgcggtccatgaagtcgatcttcactccgggaatcccccactcctccagcgtcgcgaagagccggtccatgtccttctcgaccgccaaccacgtcagccaaagtacgatctgcacgttgcgctcccggccgtaggcgatcagctcctgcagatcgagatcgggattgggatggaagacgtcggtcgtcgaagccgaccagccctcgtccatgatgatgtagggaataccgtatcgggcggcgaagtcgatgtagtaacggtaggactcggtattgcgcccggcccggaaatcgacgcccgtcaggcgcatgccgttccaccagtcccagctgaccagccccggtttcacccaatcccagtcggcgtcggccgcaggttcggcgagcagccagaccagctcgttctccagcagggcggcgtccttttccgcaacgaccgccacccgccacgggaaggtgcgcgttccttgggtgcgggcgatatacggctcctccgcgacgatcttcagattgcggtcgccggcgggggcatactccttgggcacacgcggaaacagcgattcgaagccgcccgcgccgtcgccccggacgaacatgcaggggtaatcgcgcacatcggattcggccggcagcactttcttaccgccgggcattccgaccaatacgggtagatagctcatgcggtccgtcgaatcgtattccgccgtcgccacacgggtataaggctcctcgtacatcgaccggaaaccgtccacctcggaaagccacgcttcgcttccggcgggaaatcccagccggcacgcctcgcccatgacctcgacttcgcccggaagcgacgtcacgaaacggtaggccgcaccgtcgtcgaacagccggaactccacggcgtaaccgcctgcgaaattgagccgcacggcgttgtaacggttgcgcaccgaagcgttcttggtcggattgcgccgttcgagcacctcgtcggccgacgaacgcttcacgctccgcaggcggggcttttcgcccagcgtcctgtcggcaagcgtcagtgacagcgtacagttttccaatatcttgtcctccccggaccaaaggtcgtaagtgatccggtccgagacatcgaccgcaagtcggagatttccgccgggcgacgcggcctcgacggttttggcttcggcggcgcaggccagcgtcagcgcgcacaacagcgtgaataatcgtttcatcatcattcgggattagcggagcgtcataaaaaaagagggccgcagtcagaccgcggccctccgtaaattaacctatttaacctctatcgaattcagcagatcggtcttgccctcgttcaccagcttgagaatcaactcgccgaacagcgtgttctgccatgcgaaccacgagcgggtgtagtccgcgggatcgttcacgttgaacgactcgtgcatgaagcccgttccggcgtcggtggtcatcagcatctcgacgcagcgtttgatctcggcgtcgtcctgcgacgtgaaagccttcatcataatgctcatcggccatgccatgtcgtaaccgatatgcggaccgccgatgccctcgcccgccgtaccgcggaagaagtagggattcgactcgctccatacgaagcggcgcgtattgcggtagatcgggtcgttcacgtccatatcgcccaggtaaggcatcgccagcaggctcggcacgttggcgtcgtccatcaggaagcggttgccgaagccgtccacctcgaatgcgtagatcgtgccgaattcgggatggttgtaggtcgcatatttcttgagcgcggtctcgacctcggcggccagcgcggtgcactcggcggccagcgccggctcgtcgttcaccttggtcagaatctcggcggccttgcgcaacgaagtcacggcgaagaagttcgacggcacgaggaacaggaacgtcgtggcgtcgtccgaaggacggaacaccgaagcgatcagccccacggggttcaccggattgcccttgcccgcattgcagaccgtgtcgagctgacggtcggtcacacgcatgaaggtgtaaggacccagtccctccttgcgctgctgctcgcggaaggttttcaggatattcttgatggcggccatccagtgctcgtcgaaaaccgaagcgtcgcccgtcgtcagccagtactgataagccagccgcagcgggtagcagagcgagtcgatctcccacttgcgctcgtggagttcggggcgcatctcggtctggtcgctcatccactggtggtcgggattcggatcgtagggatcgaggaatgcgttggcgtagggatcgagttcgatgcacttgaactggcggcggataacgcccgccagcatgctgcgcaggtgctcgtccttattggccagctggagatagggccacacctgcgcaccggagtcgcggagccacatggcatggatatcgcccgtgtaaacgatcgtatcgtccttgccgttggcgtccttgcgggcgcggaccgtcgtgtcgagcgtattggggaagcagttctccaacatccacgccagcttggcgttggtcagcacgcccttgatgcgggcgatctcctgttccacggcttccgaacggaacagacgttcggcttcggcgggacggttcgtcgcggcatatgcggccggcgtctgcgctttggtcttcttgccgggcttggccatacgcgtattgtcggcaggcatcggagctgcggcttcgcgcgcagcgggctgcggggcttcggcgggagcggaaaggctcaccgtgcgggccgagacgccctctgcggcgcacaccacggcggccgcaaggcagatgttaaggattttcttcattttcattttgttgcaatgtgtaagttgagtatggttattttgtctggtccagtttcacgccgctcatgcgtccgtacatctcggccatggcgccctgcgtcagcagccacttctcggactgcttgtccgcccccgtaaagtcggtctcgaacagcccctgcgcatcgcgggcatgctcccacgcatagtcgagcgtgcgctgcacgtcgccgagataagccgcattgccgtcgatggcgtagagttcggccagtccgcgcaccatcaccgccgagaaccacacgttgcccttgtcgatgatgcggaaggtctcgccgccttggggcgtgaactccccgaagaagcggtcgtagcaggccgccgccgtacgctgggcgtctttcaggtagctttcgtcgcccgtcgccttgtagagcagcgccccggcttgcaccatctgtccgctgttgtaggcgaacttcgcgcggccgatcctgccgtcgagaccgatgttgtcgaaataaaggccgtcttcgggatcgagcaggtgttccttggtccaagcgtagagcgccttgccccgcgcgagatagcgttcgtcgcccgtggcggcgtagagtttcagcgcgtagaccgtaccgggagcgttcgagcaggtattcttcgaatgtttctgctgttcgcaccagtagatgccgccgcccagcacgtcgtccgtgccgctctcgatgaatttccagatcatctcggcttcggcgaggtactttttgtcgcccgtggcttcgtagatatcgcagaaatcaatgcccagccagacattgtcgtcgtaaaagcggtccgaagcggaggccgtattgatataggaggcataggccgcgggcatgcgcgtcgtgtcgaggtattcggccagccccggcagtacgcgcccgtcgagcacgctgcggtacgacgcgtcggcttcgagaatcgtattcacggccgagagggttcccgaaaagggccagaggtaggaatagggattggggcgcgcctgatccgccgaagcgaggtagctcgccgtataatccacattgaacggatagttctcgcgcagcaggcggttttcggccacgccgtaatgcgcgtatatcgaatcgagcgtcgcctttgcgcgatcgaggttgcgggcgtcgcacgccacgccgccgttgttgcagcaagccgcgaaaacagacgcggcaaaagccataataagcagtttcttcatcgtttatcggttattttgcaggcaatacggttatataccatgttttctgaacgccgagcgcccggttgatgccttcgacgaccagcgactccatccgcaaatagccggaaagaaccggatgacagccgtcttgggagagctcttcggacattccgccgctgccgttatcgagcgcccgatggtaatccacatagggaatcttctgctccgcggcatagcgttccagcatcgtattgagtcgtcggacctcatcggcaggctccatttcgggccgccacgagaagcggtcgcagggcagcaacgaacaaagcaccaccttgatcccgttgtagcgggccagatcgcacatcgagacgatgttgccgaagacgttttcgagttctatggggccgttgttccgcgcgatgtcgttgatgcccgccagaatgaccacgacctgcggtttcaggtcgatcacgtcgctgcggaaacgggcgagcatatggacggtcgtctgcccgctgataccgcggtcgaggaacccgttccgttcgaagaaatcgggatcgacgcgaatccagctatcggtgatggaattgcccatgaagaccacctcgacgggccggtccaacacggcattctgaagttcataacgtccgtactgcgcccagtccaccggtccatcggcacgaagcgccgcgacggagaaaagagccagcgacaagagtacgatttttttcatgcaggtcatacgggtttcgggttttcgctaacaaaattagaaaacgccggggaatcggcagtccgtatccatgaagaaatagtacagatacgtgccaaacactcctgaacaggcattttcacgcttccggccccgcatatcggggcgtcgggtccggttttgcaaccgcaaaaatacgatttttgtctgttttctggacttttcgacacaatatttatccgatttaagccgtattttgcataaatttgcacaaaagagttcaaacctacctaaccgacagttcccatgacacgaaaaaccggtctcgtctggctgctcctgctgttctgtacggcagtccgcgccagcaacctgcggcagatatcgagccgcgaagggatatcgaacaacgccatactttcgctggctcaggacaaacacggattcatctgggtcggaagctgcgacggcctgaatatgtgggacggagagcggatgcggctcttcccgaacgactggggcggagagactccgctgtcggggaatctcatcgaggagatcgccgtcaccacggactcgctcttctggatccgcaccaactacggactggacctcttcgaccccgacagcaagcgggtcgaacgccatgcggacttccaaggaatgtacaaaatcgtgacacggcgcagcgacgaagtgctcgtcgtcacgcaggacaacaaattcagctgttacgacccggcggcgcgccggttcagctccgtacagcccatgtccggcatcgactacgccgacatcctcgacatgcagctggacgacgacggcgccctgtgggtattctcccgcaaaggaatcttccgcataccggtcgcattcccggacaaaaacaacgaccggatcggcatcggacagcccgaacggttccccacggtctcgaatcccgaatacgcgttcgccgaaaacggcagcggcttcttcatcgacgaaaatcacatattctacgaattcgacatccgggagcgccgcctgatctacaacaaggacatgagcgacgagatggcgcgcatgggcagcgtgtcgagcatcgtccgcgacggcggcgactacatcgtctcgttctataccaacggcgtcatacggctgcgcaccacgcccgaacagagcgtgaaatacgccaccgaacacatcaacatcccctgcggcgtcttttcactgctgcgcgacgcccggcaggagatcgtatggatcggcaccgacggacagggactctaccagcatacgcgcaacgccacggcgttccgctcgatcaccttcaaccaactgccctacaacctctcgaaacccgtccgcgcgctctacatcgacgacgagcggacgctctgggtcggaaccaaaggcgaaggcatcctgcgcatcgccgacttctacgaccgcaaggagttcaccccggcgcatgtgcagcagctcacggccgacaacagcgagctgctcgacaattcggtctacgccttcgcccgcagcagacgcaacctgctctggatcggcaccgacggcgaaggactgaactactattcgtacggcgaccggcgcatccgcacgctccgcaccccggcgccgctcaaatacatacacgccctgtacgagacttcgcccgacacgctgtgggtggccacggtgggctgcggcgtattccgcgtgacgctgggcggcacggcgtcgcagccctcgatacgcggggtcgagcaactgcatttcaacgacgaactggagatcaagaacttcttcttcacgctctaccccgaaaacggttcggcgatgtggttcggcaaccgcggcggcggcgcggtccgctacgacatcgcaggcggcggcagcgaagtcttcaagttcgacgcggggcgcagcgccatcgccaacgacatcttcgccatccaccgcagcggcgacggcaccatgtggttcggctccagcggcgggctgatcgaattccggcgggattcgacctcgcacgttccgggcatccgcaacaccgtgcacggcattctcgaagaccgcaagggcgacctctggctgagcaccaaccgcggtctggtgaagtactcgccccacacgggctacgtggtgacctacggctattcgtacggactgaacaccatcgaatacagcgacggggcctgtttcgccgacccgcggacgggcaccctcttcttcggcggcatcgacggactgatgaccatcgaggatacgggcttccgcgagcaggagtacaatcccccgatgctgttccgcgacatccggctcaacgacggcatccgcaacatcggcgacatgctctcccgcgacggcgtgctgacgctcagacacggacagcgcatcttcgagatcacggtctcggcgctcgactacgtgaacggcagcaactacagctattacagccgtctggacggctacaacgaccagtgggccggcgcgtcgtcgcaactctcgttcgccgacctgccggccggcacctaccgactcgacgtgcgttaccgcaacaacatcaccggggccgaaagtccggtctattcgctgccgatacgtctcaaaccggcgtggtatgcgaccgcggcggccaaatgtctctacgtgctgttgctgctggccgtagtcgggggcgtcatccgccattacctgctccgctaccgacgccgtcgcgccgagaaactgcagcggctcgaaatccgccgcaaggaggaggtttacgaatcgaagatgcgcttcttttcgaacatcacgcaggagctgtcgatgccgctgacgatgatctccgctccctgccagcagatactcgcctaccgcaaggcggacccctatgtgctcaaatacgcgcagaccatacggcagaacgtctcgaagctccacgacctgatctacatgcttcacgagttccgcggcatccgcacggggcagaacgacgaaagcgaaaacatcgagctggttcccgtggccgagatcgcgcagagcatggtcgagaccttcggcgaatattcgcagcagaacagcatccactgccagctggacatcgaacgcaacctcgtgtggccgaccgaccgcgacggactttcgacgatcctcaacacactgctgtccaatgccttcaagcatacgccctacaacggcgccgtaagcctcacgatccgcagcgacaacggcaagctcctcatctcggcctccaacgacagcgtgggcgtcaatctcgaagacatcgaagcgattttcgaccgctaccgcgtactcgactatttcgaacgcaagagcgagcgcggcctctcgtttcagggcgacctgcgtctggcgatctgccacagcatcgtggtccgcatgcagggcgaaatcaaggtcgaaagcactcccaacgcgcagacgaccttcaccgtactgctgccgcaactgaaagtcacggccgaaaacgccccgaccgcagacaacatcgtgcccgcgtccaaagaatacggactgcccctgccgaccgtgacgcggcgcgaattcccgttcgacaaaaaccgcaggacggtgttcatcgtcaacgacaattcggagatcatgaatttcgtggccgagcttttcgccgcggactacaacatcaaaatgccgtcgggcaaaaccgagatgatcgagctgctcaagcagatgcaccccgacatcgtcatctgcgacgccctctccgagcagtccgactgcctgtcgctcatccagttcatcaagcagggcaagctgacctcgcacatcccggtcatcctgctctcgacggcccagcagatcgacgagcgcatcaagggcgtggagtcaggcgcggacatctgcctgacgcttccgttcaacgtcgaatacctcaaagccgtggccgagcagctgctccgccgcaaccggtcgctcaaggactattacaagtcctcgatcagcgccttcgagctttccgacgggcgcatgctccatcaggacgacaaggagttcatcgaccggatgctgaagatcatcaacgacaacatctccaacacggagatctcgaccaaattcatcgccgacgaactgggcgtaagcatccgcaacctctaccgacggctggagggcatcctcaaccagacgccgaccaacatcatcaaggagtaccggctggccaaggccgaacagctgctcacgaccacgaagctctcgatcgacgagatcatctacaaggcgggcttcgtaaaccggggcaccttcttcaaatgcttctccgccaaatacggctgcacgcccaaagtctaccgcaaggagaaactctcgcagatccgtcaggaagtgggcgaagagagcgaagaggccgcagagcggtcggcgtaacgcctagcaaagctccggcgaagtccggcataacaaccgcccagctacggcacggcatccggcgaagcccgacataacagcggccacagctacggcaacacatccggcgaagctccggcataacagccgccacagtcacgacacggaatccggcataacatccggcggagcatatcaaacgaagaaagagcgggccgaaacccgctctttctctttgcctgtcctgaggaccttgcgccctactcgatcagcagcgccatggcctcgatcatcgtcgaagcgctgacctgctcgttcagacggccgtcccacgaagatcccggctcgccccagaatccgccgaagaaccacttcgatccctccgacttgtccacgccgtcgcgccagcagaccagcccgttgtagatcaggaactcctcgatctcccggcgcagccccgcatctgccttatcgaccgaagcgtccttccagacgttcatcgcatagcggacgaaaatccccttgaaaagcgcattgtcgcccgaaccttcgttgttcagcaccccgttggtcaccatcgacttcatggtgtaacgcgccgcgcgcgcggcgtcggtcatgtatttggcgtcgcccgtggccttgtaaagctcgtgcgcggcgcccatgaacgtaccctgattataggtcagcgcgccgccattgatcacgccgttcttcatgttgtcggacacggcgcccgtcagcggattgtagagcgtcgagctgagccagttgtaaatcttcttcgcatcggccagatactgatccctctcggctccttcggggctgttggcccacaggcgcatggcgcagagggcgcccggaccgttcgagcaggcgttcttgctgttctcggcgtcgaagctccagcggatgccgccgccgttctcgtcgtcggtccagcgggcgatcaccgtctcctcgtaggtcttgcgagcagcgtcgaggtacttctgcactccggtagcctcgtacatgcggatcagcgtcaggatgatccactccgagtcgtcggtgtaggcattgccgaaaccgtaagttccccaatagctgttgccgtagttattgcccttgttgtcgtaccatttggacatgtagccggcataggtgtcgcggcgggcgtcgccttcgggaatacgcaggtaagcgtctatgagcacgtccatcgcatgagcctgcggccagtagcagtaggtcgattcgttcgtgcggtcctgatcggtataccagaatgtgccgcggtcggtattcatgaaattctcgatcagcttctcgtcgatcttgtcggcatgggcggtccagtcctccccgtaagcgggttcgagcttctcggccggatccaccacctctttgccgtagtatttgtcgtccacctcgcaggcccccagcagggtcgccgcggcagtaagcgctaaaatgtattttttcataagactgtcgttttttaccggggaggggcacgccttgcggagcgcgcctcccccggatagttggttaatccagatactcgatatagttgtagtagtgctccgtatcgggactcatgtcgagcttgatgttcacccgcttggagtcgttgccgcggtaggcgtggagcatcttgaacgcgccggcatcgtcgccgttcacatcggcgatcggccagaatacgcggaagcgcgaatcgttctcggcaggcttggaattcaggtcgcccgtcatgccgggattggcgccgaacttggtcttcacgccgtccacctcggcccagaagaagtaacggtcgtcgtcccagtccctcaggtagggtaccacacctgcggcataccagatgccgttgccctgataaggcagcttgatctgcttctcggtatgctgggtcttgacgttcggcgagaggtaacgcatgttctcgatcttctggagcttcgccgtgcctgcgccgaagtcgagcaggatgtaatagatggcctcttcggacgaaacgacgcttgcgtcgctctcccggatcgcaccgccttcgacgacgaacttgcgcgcatcggccgtatcgccgtcggtgaagttgtaccctgcggcgtcagtcgtcagcttggtgaaaatctcgaatttgcctgcgcccagtgccttgagggtctgatagccggaaccgaactccgaagcggcgcccgtgatgtaggcggcggtcggaatacccttcatgcgggtaaccgtgagcttgcgcccggaggagagcgccgtccacgaaagcagtttgctctctacggcccagtacaggtcgcccgtgccttcggcggcaatgcccgcggcatcggcgatcgactccagctcggagaaggagacgtccacggagccgttatactgcgcctccttgcggccgacggccttttccagcgcagcgtccgaatagaagaccagcgtatagctcgtcagtttgcccgcagggtccgaatcgggaagcttgttccacgagaaggtctgcttggcgcccgcctgcgcattcagcacgacggaggcgttgtcatcgggcgagatcagcgtcacgggagtggcttcgggcgcgaagtcgaattcgtaacggtggtagtacgcctcggcttcgggcgagcagtccacgacgatcgtgcaggtgacgttcctcagcacggcgatatgcttgaaggagtagtcccactgattgatattgcccgtttcgcgcattgacagcctgtactgcggcccggtcaggccggagggcatgtccgaatcgctcatatcgctcgacgagtagccccagatgtaatccgtgccgtcgatcaccgcgtcgaaacggtagcggttgtcgccgtcccaagtgatctgacgcttccagacgccgttgccggcatattccatcacggcatcgggatcgggcgtccagcaccagtggtatttcacgctttcgatcttttccatcttcacggtaccggccttgaaatcgaccagtacgcggtaaacgccgtcgcccgtgcctgcggcatcggcgccctcggtcaggcgaccttcggcgacgccgaacgtacgcttgctgcccgccgcattgcggttgatgaagctgaacgagccggtgaatcgggtgtaaatctcgaacttgccgtcgcccagctcgcgcatctgtttagccgcggcgggatccgtaccgaactcggagccttcgcctgtcacatagaggtggtagggcgcgtcgatcacagcatagcgtttgacagtgagtttgtgcggctcggccggcgaaagctgttcggctccgcccagtccggcgcagaccgtccaatagagatcgcccgcagcgtcaggctcgatgccggcgtcgccggcaatcgtattgagctggctgtggagcatcttcagcgaggacttctgaccgttgttgtcggccagataacggccgatctcctttttggccgcatcgaggaaaaccacggtgtagacgggagttccgaccttggagacctcccactcgaaataaaggttggcatcggcctgttcgatcagatcgagggcgtagccgtccgacggatagagcagtttttcgactgcgctgaagccggtatcgtcatattccgtatgctcggcacaggccgccagtgcaaaacccgcgagcagcagaacaaccagtttattcagtatgtttttcataggttcaattattttttagccgacgatctcgattacatgcgtacaattctccacgtcaccggacataatcagggtgatatcgactttcttaccgttaaaatcgctgtggaacttaaacttttcgggaccataggcatccccggtaaacagattctcggtcaggatgtaatactccgcaccgctcagcgcgctggggctgctgtcgttgcctttcgtaccggcccatacatacgtaaccccgtcgaaaaccggatggaagttgtaacgctggtcgagtccccagctctcttccctgaatttgacgttgtaatcggagaatttccagcagccgttgccgatatactccatattgccgttgtcttcggtgcgcggtgcgaaattgaattccacgcggtctatatgctcgaaggtgattccgcggacattgaggtcgagcttgatgcggtagacacccgatctgtcgatcgtggcgggttcggcgctctggtcgttcagcgctccgttcaccaccgtataggtcgtgcggtcgtcgcccttcgagctgacgaacgtaaagcccttgccggcttcgagctgctgatagaaggtaaactcgccgtcgccggtcttgcggccgacacaggcattctcaagatcgctgccgccctcggtggcttcgcccgtgaggaacaactggtccggaatcacattgaagcccagcagacgcgtcagttccaaccggcggggcgtcgcaaccacaggcgcggtatccacgccccggctcgacacgaccgaccagtagacggctccgtcagccccgacgtcgatgcccgcggcattggcgatgcggttgatctccttgtggacaatatccacgctggtcgacgaaccggcgtcacaacggtaaacgatctcgccgccgggcttgccgaagaagaccacctcgtaatggggaagctgtccgtcggcagccagcgccggctcccacgaaaaacggagcgtcgccgtcgaagcgctctgcagctccacgtaatagttgtcggccggcagcagcagcgtctgcaccggagtgacgcctccgggcttgtactccaagtcttccgagcaggagatgcccgtaaggacgagggccgccatcagtatgttcaatatctttttcattgttttcgatacttttttgattgacgattaataacccgaattgttgggcagcagcgtcggcacgagctgcgtttcggagagcggaagcgaccagaggatgtcccggctggaattgaacttgaattcgtcgatctgacggcctccgttcagctccttggcgccgtagaccgcaccgttcaaaaggtcgatgacgccctgcgacttggagtccttgtaattgatccagcggatcaggtcgaagtagcgcagtccttcgagcgccagctcgacacggcgttcgtcgcgtacgatctgggtgtaatcgcccgacgaggggaagtcggtgccgctcagccccgcacgctggcggatcggcttgatcgtctcgttccacaccgcggcgtccatctcgttcaggtacgccttcgcctcggcgtacatcagcagcacgtcggcataacgcatcatgatgatattggtccacatttcgaggttcttgccgtgggtcgtatcgaaatacttgcgggtgtagaagcccgtgggcgaaccgttgtccgtaccggccttgtcattgcccgaagtcacgttgatcgtgcctttggtcacgtattcgcccttatcgttgcggtctttccacacatagccgttgtagacgaccgtagcggtcagacgcggatcgcggttcgcatagacggtcttgtccgccggaaccgagccatcggcattgaggtagctgtccaccagcgcgcgcgtcggagccttctggcagaggttggcgcccatcgtcaggggaaccatcgaatagagcgtggaccactgcttgttcagctcgacggcggcatagtcgaggatcacctcgctgttgtattcggcggccgaagtaaagaggtattcataggccggaatgccgtcgccggacccttgggtcagcaggctgtaggtgccgtaggtgccctgctcgtggatgagcttgtcgcagatatcggcggccttgcgcatgttgtccgaaaccgaattgccggtgcgctgcacgttctcgtacatatacatacgcgccttgagcatcatggcggcggctttggtgatgcggccgttgtcgtcggctttcagttcgtcgcgggtgggcaggtcgccgacgatctcgtcgagttcgcggtgcagcgcactcatcacctccggatagggagtgcgggagacgcggcgcgactcttcgagcgaaatatcctgcaggaagaagggaatgtcgccgtagaaattggccagacggaaatagaggaatgcacggataaagcggatctgcgccttcatcccggcgagccgttcggggtccatgcccggcacctcgtccacgaaattcataaagacattgcaggtcttgacgccctcgaacacccatttccactcgctgcggaacagtcccgtgttgggcgtcgcctgccccatgcggatcgtgcgcgtgtcgggattgccgcgctgttcgtacaagttgtcgctcagggcttcgtcctgccagatcttgtcgtggccgaacatctggttataggccatgttgagcaccatgttcgcacgttcgggcgaagtccagaaagccttgtcggtaaacttgttggtaggctcctgatccagatcgttgcagcctgcgagcagcatcgctccggcggcgaacgtcacggtgatatattttaaaatcgtcgttttcatagttttcgcctttatttaaaatgtgatgttcagaccggcgccgaagtaacgcaggttcgggtagttgcggcctgagttggcgccgcccgaattcatgttcgagccgaactccgaagattcggggtcgatgaacgaacagttgctgaacgtaagcaggttctgggcgttgaagtagatcttgaagcgcttgacgccgaatttcatcgaaatccgttcgggaagcgtataacccagctggatgttcttcaggcgcaggtaactgccgtcgaacatgtagaggtccgaacccatgcggtagttgttctggttcgaggggtccgaaatatcggtcagacgcggccagcgggcgtcggtgttggtcggggtccagaagtcgagctggtgttcgtacatcgtgtaaccgtagttggagtggaacggctcgatcagctcgccgcggaccatcatgtcgcgcttgagaacgccctgcaggaagatcgagaggtcgacgcctttccatgcgacgttgtaggtgaagcccagcgtgtagcgcgggaaggcgttgcccagatagtagcggtcgttctcgtcgatggtgccgtcgccgttgcggtccttgaatttcacgtcgcccggcttgacgctcttgcccgtcggcacggccgaatgggcgatttcgtcatagctctggaagaagccgtcggtcttgtaaccgtagtaggagttgaacggcagcccctcgcgggtgatgcgccagaactcctcctgtccggaaatatcctcgaagccctcgtatttgagcaccttgttccacgagtcgccgatgttgaactggaagaagtgcgaccagtcgcgtttcttgagcgcatagctgagcgtcagctcccagccctgcgtgcgcatctcgccggcgttgtagttctgcagctcggtgcccagaatcagcggggtctggggcttgaccagaatgtcggtcgtatgtttgttgaagtagtcgaagccgaggttgagcttgccccggaagaacgaggcgtcgaaaccgacgttgaaggtcttggacacctcccactgcaggttgtcggtaccgagctggaagccggcgccgccgacgcccacgttattgaaggcataggtgttcgaatagacgttgtaggtggtgaagtactggtagtcgcccaccgactggttgcccagcgtaccgtaggaaccgcggatcttcaggtcgccgacgttgtcgcggtagctctccatgaaagcctcctgcgagagacgccatcccagcgacacggaggggaagaagccccagcgcaggtcggaacggaatttcgaagagccgtcgtaacggaacgagaactcggcatagtaacggttgtcgtagtcataagcggcgcggccgaaaacggaggtgaggctggtgcgggtcgtgttttcgggcgtcaccgaagaccggccgtcgcccgaaatgacggcctcggtgccgtcgccgttgatacccagatcgggatcggcccatttgaaggagatctggttcgcttcggaggtgtaggactcgttcgaggcgcctaacagggcggtcacatggtgcttgccgaacgtacggtcgaagtcgagcatcagctgagaattgatcaggtaggcgcgtttgttccagtcctccgacttgttgtcgttgttggccgaacggccttcgccgaccggattgcccgcagcgtcggtattgtagaacatcacttcgtgcgtccgcgtatagcggtggtcggcgaagatatcggcacccagcacgccgcgcagtttcagcccgtcgatgatcttcacctcggccgacaggttggcgttcacatagtcgttgcggtacttgttgtaaccgccctcttcgagcaggcccagcgagttgcggtcggtcagtttgtcgttgagcaggtatttgcccgtcacgggatcgtactgacggtaatagtaataggtgggaatacgcatcgcgttggcgatggtcgaaccgtcggtcgtcgtcttgctgttctcgtgcgaataggagagcagggccgttaccttcacgcgtttgtattcggtggtgatgttcgtacggaaattgtaacgctggcggccgtaatcgggaccttcgaagttgctctcctgatcgtaatagcctgccgaaatcatataggtcgtattggcgccgccgcccgatacgctgacgttgtagttctgctgcatggccgtccgcagaatctcgtccatgtagaacgtgccgttgccgtgcgccttgaggtcgcggatctgttcggcggtaaaggcgggagccagccccgaattggctttggaaatgttgagcagcgtggcgttctgccagccttgaacgggcgtgtagagcacttcgggctgctgccagccgaccatagccgtgagttcgacggtcggagcctgattcagcttgcccttcttggtggtgaccagcaggacgccgttggcggcgcgcgaaccgtaaatggcagccgtaccggcatccttcagcaccgagacgttctcgatgtccgagggattgagcttgttgaagctggcgttgtccgacaccagaccgtcgatgacgatcagcggttcgttgttgttcatcgtaccgataccgcggatgttgatgttgagctggttgtcggcggggtcgctgcttcgctgctggatgacgaggctgggcgaagtgccctgcagcgcctgcgtcaggttggcgacggaacgttcggtgatggcttcggacttgatctggtccacagcgcccaccgcacggcggcgggtggtggtgccgtagccgatgacgatcacttcgtccatcagctgcgcgtcttccttcagcgttacgttcagcagcgtgcggttggccaccggaagcgtctgcgtctcgtagccgatgaacgagaagtcgagttcggcatcggcggcgcactggatctggtattcaccgtcgatactggtcgaggttccgaccgaagtacccttgacaatgacggtaacgccgagcagcggcgctcccgcggcgtccttcacaacgcccttgacggtgaccttggatgtctgggtcagggggctggcattaacggttgcggctgcaaacccaagggggggggtaatcagcagcaccaaaaccgtcagcatgattttgtgcccaaaattggtcatagatattgttttttggtttagttaaaatatactccccgcacccggtgacgcggatgtggttcatggattcagaaaacggaaaaataacaggataaattacgggattctgcaaaaaaatcagcggaaagaatcagacaggagtttttttccataggctaatctggttttaagttttaggttaagcggtcggtttttgtgaaaacaaagttgagaaataagatgcggaccgaaaaatatacggacggcaaatttctccgccgtacatgatccggtactattttgtcacaaaattgtattttccgatccgggacacaaacgtactcccggcaccgtcccgcgcccccgatcggcggttttcacgccgttttatgacaattcgggcacaaaaccatacaaaccgcgtcacaacgccgtcctgacacaaaaactccggcccggctttacagccgggccggagcgcctaattataccacttaaaaaacttgttacttcacatccggacggatgaaagtgccgctcaccggaagcacgtcgtcgatgccgttgtccgaagccgtcatggcgaataccgccacgttcttgttttcgggcagcgtcaccgtccgcgcaccttcgggaatatcgagagaaaccatatacatgtaagagaagtcgtaaggcaggttgccctcgtcgccctgatggcggtgcgtgccgatatgcgcgatcgtcgcatccttgaggaacgcttcgctgtgtccgcgccagccccactgtccgtagaagcctttccaaagcggcacatagacggcctgctcggagtcgcccaccttgaagagggcctcgcactccttgtccgaagcggccaccagcatgtagagcttcctgtaaccgccttcgggcagttcgatctcctgactgcggcacgtcacggcgtccttgacgttctcctcgcccatcacgaaccgtacgccgttgcaggtcagttcggcgggaatcagttcggcggcgaagctgccccgctgattgtcgaaacggtaataggtgtagaactcgtctgtcgtgaaggccaccgtattgtaagacagcgtcacgggcgcgctcttcacctcgaacgcggacttctgcgcaggagcggccagccgcacgcggtaggttttgggagcgaatttgccggccgaaacgatcagcgaacggccctcggtctcggctgcaccgatcttctcctcgatgccgttgcactcctcggccgagagaatctgagccgggaaggtgatgcgggcgttctcgacgggcttgccggtcagctcgtagcagcgcacgatatatccgtcgccgtcctcggccttcttcagcgcacgcacgccgatctgcggagtcgaggactccagcatcgagaaggtacggcccagcgatcccgcatgcttgggagccacgtaagccacgagcggcaggttgagctgttccgatgcggccacaacgccgctgcggtcggttcccttatgtcctacgatcgaataggtgaagtgattgacgcccagatcgagatcgcgctggtgcgggtaacgtttttcggtcgagggagtgtggatcagcgtcagacggatcgtattgtcggcgggcttgtcccagccgtatttgcagtcgttgagcaccgagatgccgtacgaaccgtcggcgtcggtcaggtcggcccacttcagggcgggcacttcgtatgccgtggccgtgttgttgccgcgctcgataaaaccgatgccgaggtcgtaagcggctttcgcattgctcaccgacatcgggaactcggctttgagcagcgtattgcggctgttccagtccaccgtcgtacggatgtcgatgcggtcgtcctgcgcaccgtcggtcagcgtaatgtactgcgtgaacttcgaatcgccgtacgtgcgctccaccttgagcgaagcgcgcacggacccctcttcgccgacggataccgaaacgttgtcggtaacggcgcgcggggtcttgtccacgacctccttcagcacctcccatgcgggccattcgttcgacggattgccttcgaaaatcgccagacggaaggccttgccctgctcgaccagttcacggccgtaacgcttgtccacgagcgacgcgatgtcgccgttcttgtcgagcgtcaccttgtaaacggcgttctcgatcgtattgccgttcacgttcagcgccgacgatctggcgggcgatgccggacggacgtcgtagacggcataccccaccgacttcacgtcggcggcgaatgcgatcacggccttgtcgccctcgcggctgagaatctgcgcggccacgcggcggccgtcgggaccgtatacggccacgcccttggctttggcgacgagcggaatctcggcctcgacaacggctttgacgggataggtcacggcgttgtagaccaccacgggcgtacccttgacgcgcgtatcgagcgaatagctcagcgcgccgaccgccgaattcatcacgtcgccgccctgccgcagggcgatcagctcgtcgttccacgaccacgtataggcctcagggatactcgtacccgtcaggtcgtcgtggaactggtgccagatgaaacgctgccagatctcggtgagtttccgctggtcgtaagccagcgcaccgagccagtcggcggcgaccgcagcgcgctcggcggcgccggtcagctcctcgttgcggcggttgtagtatttcatggcggtctgcgaagtatagcagcccgtagcgtgcacgtccatcagcaattcgccgtcgaaagagggcagctcggctttgcggccgaggtaggccttgaacaggtcgtcgctcgtggcgctgatgatctcgatcggggcgttcgggtcgttgatcgccttggtcagacggcggcaagtggtcaccgtaccgctgttgcccttgtcgccgaccccttcgccgccgccggcatagtagcggaagcaggtgttgtcataaccgtgggcggcgcgctccatcaggcgttcattatactgcacattctcaggaagttccgagttatagccgcccgtatcgaaggctgcgatcaccgaactgccgtcgatgccgtaccacacgccccacgagaagggattcttcttgtggtagggagcgtcgtaaaagtcgtgattgcgccagctgagcttctgcgtggacatgccgatcaggccgctgtgggccgcgatggtcggcagcgtatagccgaagccgaagcagtcgggcaggaaaatatcggtcgaacgcacgccgaactcctttttatagaactcctgtccgagcaggatgttgcggaagaacgactcggccgaaggcatgttggggtcgttggcgtcccacgacgcgccggcgatatgccactggcccgaagcgatgtatttcttcatccgctcgtaatgcatgggatagtactccttcatccacgaatagacgacgccgccttcgaagctgaagcggtagtcggggaagcgttccatgaggtagaggttctggaacagcgtgcgggggatgtactcgcggatggtcgtctgcacgtcccagttccactgggtgtcgagatgggcgtcgctgaccatgtaggccttgtaggtcttgggcgccacggacttgccgtcggtctgctgcgccgaagcgccgcctgcggcaaagcacaacgcggccaaggccagcataaatcggttcggtttcatatctgtcagggtttaaaagattttgagttttcacaaaattacgtaaaacagccgagagtacaagtactattttatgcaataaatgtattattttacgatcgggaaccgcttcgggcagcattttcaaaaaaaacggggcggaacatcgcaaccgacgttccgcccgtgagaaattccgcgcggcagatcagatagcgcccgcgatgaggaacacggcggctaccgtaagaatggcgtacaactcagggaaggcggccagaataagcgtcttacccatcacgtcgtggccgttgccgatagcggcgataccgttggcgcagaccttcgactggaagtacgacgaagcgaggcagaccagacccgtcagcagaccggcgccgaagatggcggcaccctgcagcagcgtcatcgaatcggtcaggaagcccttgatgatgaagtagcccacgaaaccgtagagaccctgcgaaccgggaatggccgagaggatcatgtagctaccgaaagcgccgccgtttttcttcatggcgcccaccgacgccataccggcgatcgaagtaccgatacagctcgctacgcccgaaaggcccaccatcagcgctacgccgagatagcccaaaataattgcagttgttgattccataattgtaatttgttttagttgttatttgttttccgaattttcgattttgcgcaggggatcgaacgaacgcatcgacatctcgaaacctgcatttttatagaattcgacgaacgtcagacgcatcgggtgcacgaacgacgaaatggtggacatgaagaggttgatgccgtggccgacgagcagaatcggaatcatgatcagcagccgcacgacgatgcccgaaccttcgggcacgaagccgtcggccagcgcattgaacaccgtggcgaggatgccgccagagagtccgatggcgaacagacggatgtacgacagcacgtcggagaggatgcccgtcagattattataggtatcccacaatcccagaccgaagttcagcagcggattcttgcccggcgaattgaagaacagcatcagcaccgcacccacgccgagcgtcgcatagaacgcgggcgacgaggtggtgtagaacggaatcacccattcgggattgagcagcggcagaccgccggcgatgcttccgccgaggatcaccagcagccagcccagcgtaccgagcgaatagcggaatccgacggtagccgagatcatgacgaccttcagcatcatgccgaacacgatctgcaccacgccgatcgccaaggcgatcgagaagaaactgccttggaagtcgaagaacgggatcgaagggaagtactccttgagattcacgccgaacaccgaaccgcaggccagtcccacgacgaccgtcgtcaagccgcacaacgtggcgaaccacgcggcctgacgcatcatgccgggttgccggttcttggccagcatccacgcccccagcagggccagaatggcgccgtaaccggcgtcgttcaggcagatgccgaagaaaagcatgtagaacggcgcgaagaaaggcgtcaggtccatcgtaccgtacttcgggcgggcgtacatgtcgcccaccagctcgaaaatgcgagcgaaccagttgtttttcagtttcacgggcgtatcgtcctcaggagtcggatcgcccttgaggtacacgacgttgggatactgctccaaaagggcatcgaccttgtccgaagtctccttctcggcccagccctccatgacgaccagcgttccgtcggccgcctgctgcgccgtagccttcacgcgcacgccctgcagctgttccttcagcgaggcggcatgcgccgcgagcagcttctccgaaaccgcgacgcgcgagaattcggcgtcgagggcgctcagctccttccgggcttcggcgatgcggcgttccgcttcgcggatatccatcgacggggttttcatctcctgcgcgtcgagcgtcacctcctcgccgggagccgccacgacgacgaaatagaccgtcgattcggtgcggttgatcggcgcgatggtatagcgttccgcccactgggcctcgaacttgtcgtaattgctcttcggagtgaggaaatatcgcagcacgatgccctgctcggcgagcgagcgggttctctcaggcgagaattctccccacggacgcagttcgtcggccgttttttcgagacggccgatttcggcgtggagcgccgtcgcctgctgatgcgccgcggcgtagtgttcgtaggcctcggcgccggttgcaaacggcttcgcaccggccttgcagcgcccctcttccgcgcggaagttgcgcaggaattcgaacgccttggcgtgtccttcgatatcgagcagcagctggcggtcctcctcggagggttcccagcccgtagtggtgatgtccaccaagccgagttcgcgcagcttttcgataaaatcctcgctttgcgccgcatagagcacaaagtcgtatttcgccattttagctatcataacgtcgcgccctccccggcctgctgctgtttggttttcacgatcttctgggccgacttggagaggttctcctcgtcctccatgaagcgtttgatcttacgtatggcgtcctcgtatccgggtatctgcaccttttcatacaagttcaccttctgagtggttttacggcgtgcatagtccagcagctccatcttgcggttgtagacctcgaactcgatacccagctgcgccatgcgcttcagaatatcgactccgtcggcgaaccagacgggcgacgagaaaagatcgtagggtttcacctcgaatttcacgtcctgcaggaccggcgtacgcacacctgcgattttctgtaccgaaagttccacatcggcgatacgcaggaggtcacaatcaaactctccccatagcgacaccatgtagtcgtactcggccttgagccggtcgagccgacggcggtaatcgcctgcggagtccttcgccttcttcacctcggagcgcagggccgactccttacttttgatcgtagggagcgccttctgccgcattttcagctgcttgccgaggtcgccgagcgaggtcttgttatattgaaatttgattgccatcgtacgttacgcttctttccagtactttttgatgagttcctccttgatagcgacctcctccttggagaagtacttcgcaaagagtccccacgccgtgtcgagcatctcggtgatgccgatattgacgtcgatcgagagcagtttctccgaatagtcgaacgcgaatttcagcgtacgttcgtcgtaatccgagaggtcgaaaccgttttcgagcttggtcttggcgttggcggcatcggcatacagacgcacgcaggcgttcatcacctgcggatggtcctcgcgggtcttcttgccgataaccagctgcttgagacgcgacagcgaacggaacgggtccacgatgaccttgcccgtatcggagtcgttgcgcaggaacagctgaccctcggtgatgtaacccgtattgtcgggaatggcgtgcgtgatgtcgccgcccgaaagggtcgtcacggcgatgatggtgatcgaaccgccgttgggcagctgcacggccttctcgtagatcttcgccaagtccgaataaagcgaaccgggcatcgagtccttcgacggaatctggtccatgcggttcgacacgatagccagcgcatcggcgtagagcgtcatgtcggtcagcagcaccagcaccttctcgcccttgtccacggcgaagtattcggcggcggtcagcgccatgtcgggaacgagcagacgctccacgggcgggttctcggtcgtattgacgaacgacacgatgcggtccagcgcaccggcgttctcgaagacggacttgaagtagagaaagtcgtcgttggtgaggcccatgccgcccagaatgatcttgtcggccttggcgcgcagggccacgttggccatcacggcgttatagggctggtcggggtcggcgaagaagggaatcttctgccccgtgacgatcgtattgttgaggtcgatgccggcgatacccgtggcgatcagctccgaaggctggatacgcttgaaggggttcaccgtcgggccgccgatctcgcgcggctcgccctcgacgatctcaccgccttcgagcggctcgccgtaggcgttgaagaagcggcccgcgaggttgtccgacacgcgcagtttcgggggttcgccgtggaagacgacctccgaatcggtggcgatgccctcggttccggagaacacctgcaacgtcacgttctcgcccataatcttcaccacctgcgccagcttgccgcccacggtagccagttcgtcgttgccgacgcccagcgcccggagcgtcacggtcgccttggtgatgttgtcaatcttggtatatatcttctgaaaagctcgtgttgtcatggtctaaagcttatttgattttttcactcacatactcctcgatctgcttgcggtagccttcgaacttctccgactgccactccgagtagttcatctgacggaagaggttgataaggcccttgaagaactgcgagcactcctcgaaatcggcgaaagcgaaatccttccggcagatgtcgagcaccattttatacatcatcttctgacgttcgagcggacagttggcgtcgatgtcgtcgaaagcgtcctgctgcaggatcacgaagtcgagcagctccgatttccagaaacgttcgtgatactcgaccggaacgccgtcgtcgccgagaatgttgatctggtcgttggcctccttgccgcgctgcacgagggtcttgccggcatagacgaggtccacccagtccttttcgatatgctcgtcgaggtattcgcggatttcgggatattcgaggtatttcgaataggattccagcgggtcgatggccgggtaacgcttcgagtcggcgcggccctgcgaaagcgcatagaagcagcgcgcggccttcttggtcgattcggtcaccggctccttgaggttaccgcccgcaggcgacaccgtgccgaggaaggttacggaacccgtctggccgttgttcagtttgaccagaccggcgcgcgaatagaagttggagatgatcgccgaaaggtccatcgggaaggcgtcctgaccgggcagctcctccagacggttcgacatctcgcgcagcgcctgcgcccagcgcgaagtcgagtcggccatcaccagcaccttgagtcccatcgagcggtagtattcgccgatggccatgccggtatagaccgacgcctcgcgcgccgcaacgggcatgttcgacgtattgcagatgatgatcgtacgctccatgagcttgcggcccgtatggggatcgaccagttcggggaactccttgaagatttcgaccacctcgttggcgcgctcgccgcaggccaccatgatgatgatgtcggcgtcggcctgcttggaaatggcgtgctggagcacggtcttgccggcgccgaaaggtccggggatgaagcccgtaccgccttcggccatcggattgaaggtgtcgatggcgcgaacgcccgtctccatcatgcgcgacggacgcggcttctcgacgtagcagcgcacggcctgcttcacgggccatttctgaaccatcgtgaccgcatgttcgcggccctcctcgtcggtcaggacggcgatcgtgtccgtcaccttgtatttcccggccgccgccacgctcttgaccgtatagttgccggccatggtgaagggcaccatgatcttatggctcacccactgctccttgacttcgcccagccacgacgcggcggtcaccttgtcgcccgccttggccagcggagcgaattcccactcggcgtcgaagtcgatcggatcggtgatcgaaccgcgctcgatgaacagcccgtccatcttttcgaggtcgttctgcagaccgtcgtagttgcgcgacaaaagtcccggcgcgagcgtcacttcgagcatatgtccctcgaactcgaccttgtcgccgatcttgagtccgcgggtgctgtcaaaaacttggacataggcgctgtcgcctacgaccttgatgacctcggccatcatcttggtatctcccgcatagacatagcagatctcgttctggcctactgctccgtcggccttgacgatgacgatgttggagatgataccatttacacgtcctgtagttttcatgaatattcgtttagtttcttattttcatttttccggtcgcggaccgcatttccgcacttcccggccgctccgcatccctcctgccggagagaccggtcccggtccggcggcgcgccgcccgcatgtgccgcgcggcggctatatcctgttcaccagctccctgccgtccagctcggccatcaggcggtcgaacatctcacgaccgcgcacggcgtccaactgcgtccagcgggccacgatattgacgcgcgccagataggacagaatggtattgatgtcgaaatagtcgaacgtcgccagctcggtggcctcgttccagcggatcaggtcgatcttgtgctccttctcgaccagattcgcctcgtcgttcacggcggcgatcacggcgtcgatgtagggcagctcgccccgcagaccgaaatcggcggccgaactgcgctccagctgttcgaccacgtcgcccccgcccacggtcacctcctcgaccggacggcccgcggcacgggccgtcacggcggccgtcacgttgcgcagggtgcggtcgaactccgaccactcgcgcagaaagcggctcttggcacggctgcaggtggcgtaataggcgtcgaacagcgcggtttcgaaacgctgcgccgtatcgacctcctcggcgtccaccccttcgggatcggcataggcacgcagcacgcggcccacggcggcgggtaaacgcttgggagccttcatctcctcttccagctcctcgcgcgtgaagttgcccagcggattgtgcgccgagcgccccgcgcgcagcgaagcgatattctcacaatcgtagtagccgtacagcagacgcacctgagccgcatccgaagccgaaacgccgtcgagaatctccccgacgatggctttggcgtcgaaacccttggtgtcggcgtcgagggagtactccttcagtccggctaccagacaataatattccgttgcgaacatacgcgttacgccttaaaaagcatgtccgaaaccttctcgcgcaggtattcgcccagcagggcgtcgaaatcggcgtcggagaacgagatgtagtaaccgccctccttggcgccgaccttgaagcccgtcttcacctccttggaataacccacttcgataccggcggagagcagctcctgagcgctcttgccgaacgcctcgtcgagcttggcgcggtcggcttcgggcagcagcgccttcagctccaccttgccggcgtcggcgccgttccagttcttggccacggacaacagcatctccttgatgaaggcgggatccatgacggcctccctgacgcctgcggccgtgctcttggcgacgatcatcgcagcgatctccgacttgatcttcgcggcggcctgcttgccggcgagcgagatttcggtcatcgtatttttttcgacgtcctcggccttgtcctgcgccttcctgacgatatcctcggcctgagcacgggcttcggcgacgatcttcgccgcctctttcttagcctcggcgaccagacggtcggcttcggcgcgtcctttctccagcccctcgtcgtagagcttctgagtcaactgttgaagtttgttttccatagcgttatttagttttaattattgtttttcattttagcgatacaaatatataaaagtttataatacaaacagcggcgcaccgcgacaatttgtccttttttgacaagaatagagaacaaaaggaagaaacacgcaccgcagaaccacttgtaattcaagctccgaaccccctctccgcgcaattcgcataccgaaatcgccccttccggaaggggctgattccggccggccccgcctctcccgccgcagagcggcacagcccggcgccgcgccgctgcggataacgccgcacgcccccggaaacagcgggtttccgggggcgcgcacaagagcgagcagaggcgtcagaacaggccgagcgacttgcttcgggccagcagacaggcgcccatcacgccggcgcgctcaccgagcgacgaaagcttgatctgcgtatccttgttgaccagcatcagcgagtatttgttgatggcgttgcgcacgggcagcatcaggtactccttggccaccgaaagcgtaccgccgataacgatcacctccggattgaacatgttgataagccccgcgatggccttgccgagcgtgtgccccaccgactccagaatctcgatggccagcacatcctccttcagcagcgcggccagaatatcgttcagcgtgatctcctcgccttttttgtatttctcggaaagcatcgacacgcgtccctccttgagtttctccagaaaaatccggtgcatggccgaaccggaagcccccgtctcaagacagccgcgtttgccgcagcggcagatgatctcgttgtcgagcagcgggaaatggccgaattcgcccgaaaagcccgacttgccgtaaaatatcttgccgtcgatgatcatccccagtcccagtccccagctggcattgatgtagagcatcgtcttctcggagtgggcgtcgccgtacatatattcgccgtaagtggcggcacgggtgtcgttctcgatgtagaccgtcgtgccgagacgctcttcgagcagcatcgtcagcggctgttcctcgacgaagaaatagctgtaactgtatccggtctgcgaattgacgcggcccgaaatattcaccccgacggccagcaccttgtcgcgggcgatcttgcgcgcacggatgaaattctgaatcacgtcgcaaagacggtccagcgaacggggatcgttgtccatcagaaaatcgaccgtcgtttcatcgatcagctgtcccttgaaattgatgacggccatcatgaccgaatccttgcgcagatcgacgccgacgaaatacccggcatagggattcaggccgtagatattcggccgtcggccgccggccgtcccctgctcgccgaaattatggacgaagccttcgtcgatcagctccccgatcagtttggttacggtcggcacgctcagattcacggccttgctcagatcggtgatgctcgaatccccgcaaaagatatactggcaaatgatctgctgtttgagaatcgcattcttgttgccttccgtcgcctgttttaaaaacgaactggtcataccgtatctttttgtgtgatttcaatattaattgtgtaaaggtagcaataaatcacgacccggcaaatccgaaacaaaagaaaatagcttcgacagcggatcatagcccatttttttcagaagtcacagcctgcaagcagcagccgcgccgaccaaaaaggcgacaaaacacgacaaaaagacaattccgcccgattcataataacaaatcttacgataacgtcaattcgcagacaattcgtttacgaacgactcccgtctaagaagcgtctccccaccgccgcatgcggctcgcggcaggacgccgcgggaaaaccgggcaagcggaaaaaaacgccgaacaccccggaaaagcaggacatgacgaacctcccggaaaagcagtctcccggaaaagcagaacacgacgaacctcccggaaaagcagcccccagaataagccgagcccccctaacacccgaaaaagcaggccacgccgtctccgaaaaagcccgacaaaaaaccggacgccgcgtcatgcggcatccggccttgtcatacacaccaagattactgatgctggggacgcagcaggtcctgcaccactttgacgggcgagaaggtcgtaatgggcacgtccacgaagaccgtattccacttggccatggcgccgttccacaggccgggaagttcctgcgcgcgcagatcgcggccgccgctcgacttcgacgaaatgaaacccgtcgaaggatcggtgtacctgcgcaggtcgaagcggacgcctttcgaattcttcatgccgcagaccagatcgacgggattgaagtgcgtggccgaccgcatcagcggcaggtcgtcggggctgatctggctcgattcggcgatctggagcgactgcgtgccgtcggggtttccgacccagaaaggaccgccgcccggttcgccctcgttgcggaccatgccgcagacacggatcggacggtcgagcacggcgcggagcacggccgaatcgtaactgccgggcagcttcacgcagagccgcttctcgatgaattcgacgatcggctccagctcggcgccaccgacttcgagcgccttgaggtactcgaacgcacgctcctgaaggtcgagcaggatgcctgccagcaccttcttgtaacggatcgtatcgccgcgcagcgcgtcggtagtgacgttgtcgatgttcttgatgaacaccacgtcggcgtcgatctcgttcaggttttcgatcagcgcgccgtggcccgcagggcggaagagcagcgtaccgtcgtcctgccggaagggcgtgttgtcgggattgacggcgatggtgtcggtcgaaggtttctgcaccgagaacgagatgtcgtaacggatgccgaaacgcttctcgtaaacgggcaccttcgcggccagcagctcctgaaatccttcgatatgttcgggagaaaccgtgaaatgaatcttcgccacgccgttcgcggccgcatagaccgccccttcgaccagatgttcctcgaccgccttgcgcgcgccttcgggataggcgtggaaggtgacgagtcctttgggtttgcggccatagccgagtccttcgttcacgatggcgctgacgatcgtccggtcgtcggcgccggccggaagcagggctttcagctcaggccagaaggcgaactttccgatgttttcgagcagggtgtcgatccccttgccgcgcttgccgtcgttcacgaactcgaaaagctccttgaacatacgcgtcgcggcgcccgacgcaggcacgaacttcacaacggacagtccggcggcggcccgctcgtaacgttcggcggccgcagcggcctcagcgtcgctcagcgtcagcacgccgtcgccgggtgaggcggcgcgcacgacgttgagaaaaggaaatccgcggcggaaattctccagctgcaactcgaccgcttcgggggtcagtccgtgtttttcgatctgctgtaaatcttgttgtgtaaacataggtattcaggtattttgttttttacggttcagagaaacatctcaccaaaattactaaattatttctaactttgcgcaagattgcacattttccgtacccgcgcccgcaccggacaacgctgtacaaggagccgagggggggggcatcccgcccggagcgccgcaaggaccgctccggaacgggcacacggagaatatatgcgcccaacgcccgccggtacaaccgggcgaacgacaaacaaacagaaacagacggcatgatccgagaattccaccaaatcgacctgagcggacgcaacagcttcggcgtcggacagcaggcggcgcgtctcgccgaattcgagaccgaagaggacctgcgcacgatcttcagcggcggcgtgcccgaacgctgggcggtgctgagcggcggcaacaacatcctcttcacgcgcgactacgacggactgctgcttacgcccgtcgcccggcagatcacgcccctcggcgaagagggcgacacggtccgcgtgcgggccgatgcgggcgtcgagtgggacgacctcgtggaatgggccgtggaacgcggtctgtggggcatcgaaaacctttcgctcatacccggcaaggcgggcgcggccccggtgcagaacatcggcgcctacggctgcgaagccaaagacgtgatcgagcgggtgcacatgttctgcaccgacaaccgctcggcaatggtcatcgacgccggacactgctgcttcggctaccgcgaaagcatcttcaagcacgaactgcgggggcgcgtcatcatcacggccgtggacatccggctttcgcgcacgccccggccgcggctgggctacggcgacgtggagcgcgaggtcgaagcccgcggcggtgtcacgctgcgcaacatccgcgaagcgatctgcgcgatccgccgcgccaaacttcccgatccgaaggtgacgggcaacgcaggcagcttcttcaaaaacccggtcgtggacgagtgcgtggcgcggcagctgcaggcccagtggcccgacatgccagtttacccggcggcgggatgcgccggcagggtgaagctggcggccggctggctcatcgataaggccgggctgaaaggctacaagcgcggaagagtcggcgtccacgaacggcaggcgctcgtgctggtgaatctgggcggcgcgacgggcggcgaagtgattgacttcgcccacacggtgcagatgcgcgttcacgaaaaattcggcatagaaatagacaccgaggtcaatatattttaatcgtatggcacttttagaggctttccgcaaatacatcgccgacaacgatctggcaacgcacgacgaccgcattctgctgaccgtttcgggcggcgtggactcgatggtcatgctgtcgctcttcacgcgcagcggctaccgggtcggcgtggcgcactgcaatttccagctgcggggcgcggagagcgacgaggacgaggtgctggtggaggaagaggcgcggaaatacggcgtcgagttctacaacaaacgcttcgaaacggcggccgaaatggagcgcacgggcgagtcgatggagatggccgcccggcggctgcgctacgcatggttcgacgccctgagccgcgaacacggctacacggtggtggcgatcgcccaccatgccgacgactcgatcgagacgttcttcatcaacctgctgcgcggcacgggcctgcgcgggctgacgggcatttcgacgcaggtcggcaaggtcgtcagaccgctgatgttcgcttcgcgcaaggagattctggagtacgccgtcgccaaccgcatccccttccgggaggattcgtcgaaccgctcgaccaagtacctgcgcaacaagatacggctgggcctgattccccgcatccgggagatcaaccccaagttcacgagtctcatgcgccgcaacatcgcacggctgaccgacgcccaactcttcatcaaccacggcatcgaacgcatacgcggcgaagcggtgaccaccgagaacggactggacacgatacacctcgaccgcatcgacccggcgttcccgcaggagttcgtcatctacgaactgctcaactcggcctacggattcaagggcgacgtcatcgactcgctctgtcattcgctcaggcacggcatgacgggccgccgcttctactcgcgcgagcgggtcgcctacgtggaccgcggcacgatcgtcgtggccccgatcgcccccggcgacgcatgtatggtgaccgtcgagcggggcgtgccgcgcagttactgcggcaactcggcgctctacttcgaatactgcgacatcgacgcgatcaagaacttcggcgtgccggagcacatcgcgcaggtcgatgccgacctgctgaaattcccgctcacgctgcgccgctggcgcgagggcgactggttcattcccttcggcatggcgggccgcaagaaggtgagcgacttcctgatcgacgccaaggtctcgatgcccgaaaaagagcggcagttcgtactgctgtcgggcgacgagatcgtatggctcgtcggccgccgcatcgacgaccgctaccgcctgacgcccgacacggaaaacgtgctgcgcatcaccaaagagattgtataacacgaccgggagcggcgattcagccccttccgccgcggggatggcggaaacgccccgccccgcatccggctcggccgggccaatgactgagatatggccaaaagcgcactgaaattcaaagattccgtcgccgcatacgaaaagctggcgcaggagatcgccgcacggcggttcgcccccgtgtacctgctcatgggcgaggagagctactttatcgacgccatcgccgagcggctcgcgacgacggtgctcggcgaagccgaacgggctttcaaccagatcaccgtctacggcaaggactccgaggcgggacaggtcatcaacctctgccgccagatgccgatgatgggatcgtatcaggtcgtcatcctcaaggaggcgcagcagctgcgcggactggacaaactctcgctctacacgcagaaaccctcgcccacgacgatcctcgtgatctgccacaaggagaagaacgccgacaaacgctcggcattctacaagggctgcgccgccaacggagcggtgctcgaatcggtgcgcccgcgcgactacgaaatcgcctcgtggctccagcagttcatcgcaaaaaagggactcgccatcgacgccaaggcgctctcgatgctcaccgaccacctcggaaccgacatttcgaaaatctcgaacgagctgggcaagctggtcgtatcgctgcccgaagggaccaagcgcatcaccgacgccgacatcgaggccaacatcggcatctcgaaggatttcaacaacttcgagctatgcaaggccgtagtgaccagagacatggcgcgcgcgctgatgatcgccgagcacttcgcccgcaaccccaaggacaacccgctgctggtcaccgtgctggcgctgttcggccagttcaaggagctgttcgtcgtgaactacctgcgctggacggcgcgccacaagggcatgccctttccctccgacgccgaactgatgcgcatcctcaagaaaaacaacgtctacgtactgggcgagatcaagcagaacgccgccaactgggacaaccgcagggtattcaacatcctcggcctgctgcgcgaatacgacgccaaaagcaagggcatgaacgccggcggagcatcggacggagagctgctgcgcgaactgctgctcaaaatcttcctactctgatgcaggaggtctacctataccagaccgttcacatcctcggcggcaggtctctccacctgacagcgcatctggccgtgctcgaccgctggtcgcgcgaacttttcggccgtccggcaggactccgccagcagcccctcgcccggcagatcgaagcgctcgcggcgcagacggcgcctgcggactgcgacctctcgcagttcgtgcggatcgtcgttcctgcatcgggcgatcccgccttccggctcgaatccgcaggcatatcgctctaccggggatacgacctgcgcagtctgatgcccgacgccgtgacgctgcaatacgacatgccgtttcccgaagctccgacttcggcgcgcgaagccgccgccggactggcccgccagcaggcccgtctgcacggcgcatcggtcgccgtgcgctgcgacggcgacggcatcgtccgcacggccgacaacgccccgctgttcgccgtgcggggcaaaacggcgttcgtctccccggcggaagcctgcgtcgaacaggaattgggcctgcgggccgtcgaggcggcgggactcgaactggaagagcgcccggtaatgcgcgacgagctgccgcgcttcgacgaactcttctacgtcgatcaccggggcgtcaccgccctcgcccactgcgacggacatccctgcatggcgattctcgcggaacgggtcgcccaatcgctcggcgggctgtttccgaaaatgtagaaaccgaacgggcccggcccgcgctatcttcgccggaaaacccgtttcaccatgaaaaaatacctgtttctttacgccgtcgccgtgacggctctgctggtatgcggctacggccgctaccgccgcgaaaaccgtcgcctgacccagaaccaacacgcccttgcggccggcatcgaacgctaccgcacgcgtctggggcaagaagcggcatcggtgcaggccctgcgtctgcgctgcgccgaattcgaagagctgcgggccgcagacgctgccgaaatccgccggctcggaatcaaactccgccgtctggaagctgcggcccggacagccacggccacgaaggtcgagatacggaccccggtgcgcgatacggtcgtcgtgcggctgagcgacacgctcgtcgtccgcgacaccctgcggctgttccgctggcgcgacgcgtgggtgcgtgtcgaaggcgccgtcaccgccgactcggtcctgtgccgcgtggagagcgccgataccctgcggcaggtcgtacaccgcattccgcggcgttttctcttcatccgctggggcacgaaagccctgcggcaggagatcgtcccgtcgaatccgcacacgcggatcgtctattcggagtacgtaaaaatcgaacggtaggacaaaatatcgggaaaagataactccctattcccaaatattattacctttgtccgatatggaaaggactgcaatcttccccggatcgttcgacccgttcacccgcggccatgccgcgctggtagacgaagcgctcaatctcttcgaccgcgtggtcatcggcatcggcaacaacaccgcgaaaacggggctgctgaccgtcgccaaccgcaagcggctgatcgacgacctctacgccggcaatccgcgcgtcgaagcccatatctacacggggcttacgggcgagtttgccgagaaggccggcgcctgcgccatcatccgcggcgtgaggaacaccaccgacttcgagtacgagcgcacgatggaggcgaccaaccaccgcatctaccccgacatcacgaccgtaatgctcttcaccccctcgcccgtggccgacatatcctcgtcgaccgtgcgcgaggtgctttcgttcggccgttcggtggaggagttcatgcccaaaggaatcgacataaacaaatacttataaacagaatcgttatgatggaattcacggccgaaatgatcgccggatttttaggcggcgacatcgtcggcgacaaagagacgaaagtacacaccgtatcttcgatcgaggagggcaaggcgggctcgctgacctacctcaccaaccccaaatacgaaacgttcctctacagcacgggcgcatcgatcgtgctggtaaaccgttcgttcgaaccttcgcagcaggtctcggccacgctcatcaaggtggacgacgccgccgcctgcgtgctcaaactgctcgaaatgtacaacgccgccaagccccgccgcagcggcatcagcaagctggcttcggtcgctgaaaaggccgaggtgggcgccgactgctacatcggggatttcacggtggtcgaagcgggcgtgaaaatcggcaaaaactgccagatctatccgcaggtttacctcggagcgggggttacggtgggcgaaggcacgatcctctaccccggagtcaaggtatacgaaggctgccggatcggccgcaactgcatcctgcacgcgggagccgtggtcggcgccgacggtttcggcttcatgcccaacgccgcgggcggtttcgacaaaattccgcagctgggcaacgtggtgatcgaagacgacgtagagatcggggccaacacctgcatcgaccgcgccaagaccgattcgacggtgatccgccggggcgtcaagctcgacaacctgattcagatcggacacaacgtccagatcggcgaaaacaccgtatcgtcggcccagaccggcatcgccggcacctcgcgggtggggcgcaactgcttcctcgccggacaggtcggcatcgccgaccacgtgaacgtcggcgacttcgtgaagatcggttcgaagagcggactggacaaggacgtgcccgacggcgaagtgcgcttcggctacccggcgctgcccggcatgcagtaccaccgttcggcggcggtcttcaagcggctgcccgaactggaaaaactggtgcacaatctggaaaaacagctggcagaactcaaaaaataaaccaatattcttgcacaatgaaaaaagcatttctcttcgcagcttccgcagccgtgctgtgcagttgcagcacgcagcccaaatacgtcgtcgaaggcgacatcgccgggctcgaaggcaccgtctacctgttccagcaggacagcctgatcgactcggccgtcgtgaaatcgggtaagttccgcttcagcggtcccgccggagcgcccgcgatgcacgacctgctcgactcgcgcgacggacagccgcaggcgttcgccatgcagctcatcctagaaccgggtacgatctcgatcaagagcgacgccgacgatccgcaggtgcgccacaccaccggcaccccggccaacgacgccgccgaagcctacacggccgccagccgcgcgctgatcaccgagtaccgcgacgctgcgaccaccgaccagcggcgcgaagcgatcgaagaggagttcgagcagctgacccgcacctcggtagaggccaaccgcgacaacttcttcggcgtcatgctgatgcccaacatggcctacgagctttcggggcaggagattctcgaccagatcgccaaattctcgcccgaaatgcagcagaccaaagagctgacggagctgaaagccaccgccgagcagaaaaagcgcaccgacgtgggccaaccctacatcaacatcctgcagagcgacgccgagggccagatcgtcaccctgacttcggtgatcgagaatccggccaacaaatacacgctcgtggacttctgggcttcgtggtgcggtccctgcatgggcgaagttccccacctgaaagagacctacgacaagttccacaagaagggcttcgaaatctacggcgtgtcgttcgacaacaaccgcgacaagtggctcgccgccgtcaaggacaacggcatgaagtggattcaggtcagcgacctgaacggtttcgacaatcccgcagcgaaggattacgccgttcagggcattccctcgaacttcctgatcgacgcttcgggcaacatcgtcgccaagaacctgcgcggcgaagacctctacaaaaaggtcgaggagctgctcggcaaataaccaccgccgtacaacctgcccctccgaactgcgacacgccgtccggaggggctttttcgaacgatatgaccccaacggaaaaataccgcatcatgggcatcgaccccggcaccaactacatgggttacggcgtgctggagatcgacggacgcagcgtgcgctcggtcgtcttgggcgacatcgacctgcacaagctttcggatccgtacgtcaaactgcgctatatcttcgaacgggtcggggcgctgatcgaccagtacgccccacgcgaagtggcgctcgaatcgccgttcttcggcgagaacgtgcagtcgatgctcaaactgggacgggcacagggcgtggccatggcagcggcgctgagccgcggcctgcccgtttcggaatacgccccgatgcgcatcaagcagagcatcacgggacgcggatcggccgccaaggagcaggtcgccgccattgtctgccgcatcctctcgctggaacagccgcccaagcggctcgacgccaccgacggcatggccgtggcgctctgccaccacttcacgatctccaatccgctcaatgccgcgatgggcaacgagcgcgtcaaaggattgggcggcggcaagaaggccgtatcgaaaggcggctcccaaagctgggagaaattcctcagggagcaccccgaccgggagatcaagtaaccgcaccgcaaaccctaattttcgacagcaaccgaacgatatatgaagaaaatccttctcacggcttcgacggccgccctcctctgcggatgcggcggtccgaattactccatcacgggcaacgcaggactcgaaccgggcgactcggtattcctgatcggcagcggccgtacggaactggccgccggcatcgtatgcgccgacagcacgatccggctaaagggtcgtgtcgccgaaccggagatcgcccggctggccgatcaggaacgcatccccgtcggcaccgccgtcatcttcctcgaaccgggcgagatacgtacggttccgacggacgacagacgggtttacgcggtatccggcacgccgctgaacgacagaaaacgggagttcgacgagcgaatggccgacttcgaccgcaaattccgagaacttcccctcgacgcaccggccgactcgctctatgcggattacaacaagctggttccggagagcatcgaagccaatctggacaaccttttcggggcatacctcttctccgtctacgaattcgacggcaacgacatcgccgcagccaaaacccgtctgaagcaatttccggccgccgtgcaggcccaccccatcctgcagcgaatcgccgaaaaagtcgcagcgaccgaaaacaccgagatcggcaaaccctacatggacctcacgctgcccgatgccgcaggcgaaccggtggcgctttcggggatcgtcggcaaaggccgctgggtactgctcgacttctgggcgacgtggtgcggcccctgctgccgggaaatcccgcacctgcgcgaggcatacgccgcctgcaaaagcaagggattggaaatttacggcgtctcgctcgacaacgacgccgccaaatggagaacgttcgtggcggacaacgatatgccatggatcaatgtgctgggcgtgaacgcagacaagcgaagcgatgcggccgccatgtacggcatttcgtcgattcccgcgaatttcctgatctcgccggaggggattatcgtcgccagagacctgcgcggcgaaaatatcaaggcccggctggaggaagcaatgcgttgatcgtcagcggacaaacccctgacaatcggtccgatgcgccggcatgcgatttttcagggcatcttttttcacaaaattacgcccaataatttgcgagtttcggattttcgccctatatttgcactcgcaattcggcaccgtagcttaattgaatagagcatctgactacggatcagaaggttacaggtttgagtcctgtcggtgtcactctcaaaatcaaccacttacagcaatgtaggtggttgattcgttttagtgcgggtacacaatttacacacaacttcgcccattttaaagacgtcgatccccagcaaacatgttcggccgctgcccctaaaccggcacaaaattgcgttcgttgatccgttcgacttcactgagggaaaaatttcccccagtaactttcacccttcccgtaacctccccgtttaatccttgtactacccctgttaaattgttctataagtttgaattttacgtagtgcaaacactcttttattgcgctaaactgttctaaaggtttgattttggtgctggatacgccggcttcagatgatcggcttcgcgcgcgtaaggacgtggaaaaattatccttgcttggggttgattttcccctcgctgtaacctcaccctaatctaaccctttttacccttggtgtaaccttggtgtttttgcattccccttgccgtaatcttgccgtatttttgtatttgtttcacccttgcagtaatcttgcggtttttctgttttacccttgacgtaaccttgatgttttttttgttttacgcttgttttacgcttgttttaccttggggcaacctttgggacataaagtcgttttcaagtcgatttttcggctgccaaattgtaaatacccttgtaatcttgccattttcttataatcagctgataaccagcaacgggctgatttgcccttgtttttaaacgtgccaaatcagacacctttaaatccccagaaaaatgggtatttaaaaagaaaggatctggacgattatttccggctccagtcaaccaaagatttcttaagtgccttacaatcattgtttgattttaaagacgggaattccccgtatttaacaaccaatccacatcgggattcgttcgggggattccccgaacggctttgccatttttggcagtcgaaaaatcggccaccaataacgaacccagccgcccgaattgacggctggggcatcttggggtgtacgcgaattcctcagcattgagtgtgtgtattattatgttgttcatctgccagcctgctcaactcggcattaaattcggtgccgatcctccgtcgctctataagctgctggagcacctcctttacctgcggatcctccggttttattgcgccgctttccaatttggcaacaatctctttccctctgcgtattaccgcatctgtctccgcagttatctcgtcatgccggcgtaaaatttggtctctgttcatgatgcaatagttttatcgggtaagtttcattaataatcctttcggcttttgatcggccttgctcggcgatacctgcgcccgcagttcctgcagctgcatccgcagttcgaagttctccatgactaattcgctgcgttcttggagtaattgaaaccgggcttcgcaggctttcatgtagagttccgaaaggctgttaaagtcggacgggttatttggctgcgtattcatattcgttattgatagagggatcaaacatcataaattcgccgtctttggcccattcccggaccgtatatcggcctttgggcaggaacccggcccggcggaccgcttcggcctcgctggggaaatatcccagcgtatgcccttcaaaggatagttcgtagatcataatcttagatgattagttcaacatcaattgcaaggtttcggatatatcgggatactctttgccttcggcgtcccagaccgccggaaccgtcacggattcctgcatatcgtcgctgcactctttcgcctcgtagtcgatgaaggcaatataccctttgtgggtgatctcgaaaccttcgcttatgccgtcgcagtggaaggtaatgtaatcggctgccttgcgggccattgtccgaatgtcggaccgggttaatgctgtattcatggtattaatttagtttgctggttctgcattggtattgattgattgtgcgtctgccggccaaaatatcacggcattctgtaagctcttttgttagttcgattattcgctggtgcgcctcaataaggcgatcaccctgttcgatgtaatcgcgtacacctttccaatactccgctcgccaatcaatttccggggaattcgtcgtgtttacgttctctttcataattttatcgaggttttgcgagaatctcgctatttgtctatttcggtaatgagtgttgaagggggacgggcggtccgcccccggttgccgttagtctccgtagtaggtcctgctgttgccgtagtagtccgccggcaccgtcaacagctgcgggcggtattccgtggccttcggctgctccgtcgggcggttctcgatcttcgccgtcagtatcgccagcttctcgttgcgccatgccttcttcaggcaggccgagaacgacatcgaggcgttagcacgtttcagataccaagcgttacgcatgatcttcgatttgttgtaggttgctttcatggctgtaaaccttttgttgtcgtttgatgatgcaaagtaaacaataattattcagccacacaaatattttgacaactttttattatcaaacatgaataatttgcacacaatgagtttaatttatatatttgtagcatcaaacaatatgtttacattatggataatgattttagaatagcggaaattctcaaaagtaagggaatgacgcaaaccgatttagccgaaaaaataggtatttctcgtgttggtctatcaaaagcaattaacggaaataccactattacaacattgcgaaagatcgccgcagctctcaacgttgaagttcaggaacttttcgcccctcaaccgacgaacacgatcacctgcccgcattgcggcaaacttattaaagtagagaagggggaataaattatgggaaagaaaacggacgaaatagacgctaaaagccttgaacaggcgcgcgccctattcgaatcgggggacatcgaccgcatagaggtcggaaccgtggccgggctatgcgagattcaccgctatttgttcggtgggttgtacgactttgccggaaaaatccggacgctgaatatcgcaaagggcggtttccgatttgcaaattgcctttatctgggtgccatcctcccggtaatcgagcaaatgccggacatgacctttgaggagatcatcgcaaaatatgtcgaaatgaacatcgcccacccgttcatggagggcaacggacgggccacccgtatctggcttgacatgatgctgaaaaagcatctccagcaggttgtggactggcggaaggtggataaggatttgtatttgcaggctatggaacgcagtccgatcaatgatctggaattacgcgccctgctacaaccggcattgactgaccgcacggaggatcgggatgttattttcaagggaatagaacaatcgtactattacgaagggtacgaggcataacggacgctaacaaagttagtaagcgtagccaattaagtataaaggccggatacattccggcctttatttggtcttagaattgttttgtagctgcctcgtttttttggatatttcaatatgaaattgtatatttgatttattaattttttataagatggaaactatttacattattttgggccttataatgcttgtgtttggcattttgcaaattatcctattttttaaattgtggaaaatgacaaacgatgttcatgcgattaaagaaaacaagccagtcgataaaaataccccagaggacaccttttgggagcttcgtaaatatattttattaaataatgttgagaaggcagaagaaattgtgttggctattttcttgaacaatgtacggaaagatatagctgcaaatggaataaccggatgtaatgtagaaaagtggaaagctgaatgtcaagcatattataaggcgattggtaaaaatattccggaatctattttaaaaatacattccggaatagatgttatccaattggtacactgacactgtttaaagagagtctgtattttacatttccaatttttattgttgtttatttaattctctgagagtgtaaaataaactgtgtcaggctataataataatagtttaacacagtttttataatatggccaatttggaaatagactacaagaaagcagcccagcagctgcgtagcggtgaagcactcttcggtaaagacggagctttggctcctatgctagaacgtatcctaaacgcagccttagaaggtgagatggatgctcaccttaatagcgttgactgcagttctggcaatcgtcgtaacggcaagatgagcaagaccgtacagacaaagtatggagaggtgatagtcgaaacccctcgtgaccgtgacggttcttttaaaccggagacagttaagaaacgtgagacaattcttgctgaaggtatggcagatcaaatcatcaacatgtatgctcttggtacaagcactcgtgatataagcaagtactttgagcgtgagtttaacacaaccctttcagcagaaaccatcagtgctataaccgaccgagttattcccgaaataacagcctggaagtcccgtatgcttgaccccgtctatgccatttgctggcttgacgccattcactacaaggtaaaagacgataagggtcgtgcagtcactcgtgcaatatacaatgtcctaggtgtaaacaagtctggtcacaaggatcttcttggtatgtatatatctgagagtgagggtgctaacttctggcttgatgttatgaccgaccttcagaaccgtggtgtacgtgatattctgatttgttgcgtagacggtcttaagggattccctgatgccatccaaagtgtattcccggaaacctccgttcagctatgtgtagtccaccaaatccgtaactcaatcaagtatgtaggaagcaagcatcagaaagagtttctgaaggatctcaagaccgtatatggtgctgtaagcaaggattctgcattagcacagcttgacatggttgatgaaaaatggggtgagatgtaccccatagtaatcaaatcctggcgcgacaactgggagcgtcttacggaatattttcagtatactcctgcaatccgcaaacttatctacacaaccaatacggttgagggctatcatcgtcaggtgcgtaaagtaacgaagaacaaaggtgtgttcccgtcagacaccgcacttgaaaagcttgtgtatcttgcctatcgagacattagtgggaaatggactatgccactgtctaattgggcactgatatcacagcaacttgccataaaatttggtgataggttcaagattatgtaactttgcctgtgaaaggctcctcttatttgtatgcagatgtgaaatctgcacacaaataagagggaaagaataaaaaacagagccgtgacacagttcagtttacactaccaattctctctttagataagcttctgcggtatctatcacatcatagcctttggagctgacgaaggacgcataatccattccatcgacgaaaataacgcccgtacctgctttatttacttcgtttagggctttattcgcttcgacacccgctgtcggatccgtatgattttgatcccctataaatcgccttttttccttgccattataagtcacggcataaccaagtgaactgcgaagattccatgtatggtttaaatagtcgcgtttgccagatagtagtcgagctgccttttgctcaataagtgcttcgtgggctttttcatccatgaaatcgacaacctcgtcttcgatattgtccataaacgctttcaggtctgctatgtctttttttatcttcatgtagtaaaaagcgttagaggctttcagtatttttcttaatgctatttatcccttcctcgatccgtgctaaggttttgtccatatttttagtgctggaatttatctcgcgcacttcgataagggtttccgcgtcaaagcgcaacgattcatagcaggcgaccgacatctgatctattctatcacctaaagtggcgatgttgtttatggcggttataattcctccagtttgcgccattgccattacataccctcgaatgtcggtgactttgccttgaatgtccgtgaatcggccgtttaactcgtcgccggtatcttgagacatagcctgaaaaccgcgagaagtcgcttcttggcccgctgcttctgcctcccactgcagaccgcgctcctcggcggcctgtttgagccgctcccataattcttgccctaccttttgctgggcaagaacatcatcaagcattgtatctacaactccggcaagtgcattgtacctctcttcatctgagagtgacaggtcccgatttatggcgtcaatttttttctgcgctttttctatttcgggtcctatagttgccgtgtataacacctgctttgcaagattcttaagcatattgccagccgcttcaccaaaggcatccgcggcatttgttccttgttcgaaagaatcgaccagtgcgtcggtcagtgtgtttcctaattcgccgaatatttcattgaggtagtcattgactgcctttatcgcttcttcatatgtctcccaattatttaccagttctttgaggtatgtctgattttctttggagaggtgtttgaaagtatcgctattcccctctacaaattctttgagggcttgcatatttaacacgccgctctcttcgaataattcagggactacatcttttaatttcttatattttgcgcttcggaaccatgtagaatgttgaacttgattcatcatgttagcaacagactctgaaacgctttcccagataaaatcatccttccataaattagccagacctgtattacctgttccaaattctacatacttttctttgccacgatttgtaattttatccattgttgcctgataggcattcatggcgtcagttaaggctgttacattattaacgtaattcccaaaggcatcttctccgaaaacagttttgaatacatcggcattcaggcgggcgcgttcattcatcacccgcagctcttcgtttaattcttgggcttctcggatattccgctccattgaagtttccgtatctccgaatatactggcaatgctttgtatgattttcaacgcagcttgaataatggccagaattacagatgcccgttctactttttggatggtggttgcggctacttctcccgtattttcaatcccttctgccgaattttctgcaagggtcttgatgctattgatcatttgcagcgagctggtcgtaatcttgctcgcggtcgatattacttcccccatcgcaccgcccgcagtttcgccgatgtcgttaaattgtccttcaattttagtgagcgtgctgtatagtttctgccacttttcaaaggattcgctgtgcttttcgtcgctaacggggtccaatttctcaatagcagatagttgcgctcgaagaacatttattttatttcgcaggtcatcccccagctcagaatccgaagaagggagtttattaaattcatcttcaagcgtttttaatgcagcttttatctcgcgctttagtttttctatatctccttttatcttgctgattaggctattgacaaagtcgccgccctccacctcaagggcagccatcgcggcgtctttttcggctctcaatgcttcggccgttcccgcgtcttttgctaagctgatttttttgtcgtaatactcctttgtagcctgtatcttttcgagaatggtcccgtacttcatgtagtactcattccacgcttcaagctggtcatctaaatatgtcttggggtcttttattcccgcttctgccaaaaacgcagtatcccattctttatttttcaacgccttaatagcctgttggcgcgctgcaattaactcgcgttgtcctcggcttaactctttcttctgcagttcacggattcgctctgctccatctgcgatggcggcttctcgcttctgatagtccaattctatttgggcgatatttttatctatcccctccggcattacgtcaatttccgcctgtcttgcttcaaatccagcatctcgcatttcgcgctgaatttgttttcgtgtgttgtctaattcaatttgatctttcgtcgcaagacctaaattctccaataccttcaactccttccgtgccgcttccaattttttgttgcgggcggcaacttcttcgggtgtcttggctacaattttttcgatttccgcgatttcctttttcttctgctctactatatcttctgtcgctttaccatccttgtcaatatcttttgccgagatgttatacatatccagcagggtatccattgcaattttattggcagaaagtacatcgttatatttttcgcgtattttagtcgccttgtttactgcttctgaaagggtattagtgactttaatagatttagtaacaactgggcgattgcctaccatagttgtagtttcgactatggactctttattaaattttttgtaaatttcttttgcctctttttctaattcaggaaccccgctttgtaatccttcgcgaaatcttgtgaagtaagcaactccctcttctttgccgaactttgcaataaatttagcctgaacgcctttaaatgcttcttccatagaagcattaaactcctccatagcactattgttggctgcttctaaccctttggctacagacgtggcagtaacgcttttcaacagcacttcataggcaccacgcatatcctccagattctgtatttcagcgcgctgtttggacaaatatttatcgtatttatccattatcgtctgacgtgctaaagcatattctgcagtacctttctttgcttgggataaagcccggaattcgcgttgtagctcctctctgctggttgtaacttggttgttgaactggtcaatattcttaattaccgagtccagcgatttatctgccgcaaaaaggtttgacacccaatttacgatctcctttccgtagagggtaagtacggtaactccggcgacaagcaaagtttgccacgagaagatggacgatgcaatctgcttccatacgggcgtgaatgtttgcccggctttcttcaattcatcaacagatttcttcgcgtgtgaaatctcgtcggccagcatcggcaggttgttggatatggccgaaaagaaaatctgcgggccatacgccaacgacggcaattcacgggcgacttgctgaatctggaatccaagcatattgaatccggaagcataattaccgacattgcgggtgtgtacccccattgccgcatccaattctttaatcttcgtatcgagtgtgtcgatatttttaagcatggtttgtccccgtgtcccctcccgctctgctgcgcttaaattccggtatatattcttcatccgggtcagcgattgcgacattttattaatggatccctcggcgaattgctctgtcttgataatgttcttcagggttccttgatatagcgccagttcttctttgtttttggcaatagacagcgaaaggtccagccgtttgtccttttgtgcctgcgagactgcggcgttgttcttttcggctttggaaagtgcattgtactcagccgtcagtgcttgcgtcttggttttcaacagctcaatttgagctgtatatatctttttttgggcgctagcttctcggatggtgccgatcaggtctttatatgctgctgcttcggcttgggccgtctgactccctgatgtcgttttgctgttgctgggagtcgctgttggggtggcaggggtggccactttagccgccgactccgcagcttgttgctgcatcttggcaattttgcgtatagcctgatctacacgagtctccagatcgctaatatggcggtttataactttgaatccgcttgatttggacgggaatttttcgagtaattcgtataaacgttcaagcgatttacggaaattgtttatctttgcggtatccgtagtaattttgaatgatagtgcgctcataacaattatttaaattttaacggttattgtgcgtgtacattagttttttggctaggtggcgtgcaattttacattacctgcgttgcgaaacgcgggtattttttatgtctgttgcggctcggatcgtcacccctttatttgtttgttttattggtggctttgttgaccattgcgcgaatttccgacaacttgtatcgccaaatggtcccggctttaaagggaaccaaaaggcccttctgctgccacttccacaacgtgcttcgatcaattgagaatatttcgcatacctgatttattgatagatagcgatcatcctttctaatctcgacaagtttgttcagcaatcttttttctaggtcggcagtgatatcctcatgaaatcgcatcaggtctttcaacttgacggtaacggtggtgtcgggatggcttttcgccagagtcattaaatcagtcataaaactttttttttgcggtgcccctcggcacccggattaaacaaaaaggtctgtcggctcaggaagccaacagaccaatcgcactatactatcatccgtggcttattccttcataagctcagtacaaagattgcggcggtcccgtgaaaaagcaatagtaaacaatgcttttctgcaatttattttttcgatgattcacaggtgtatcatttcgcatctttagctacagtttcagccaatccgcttattacgctggcaactgcagaaatatcctccagcggaatcatcatcagcgttttttggtagcagtcaaacaactcggcgaaagatgcccgtttcataatccgccggcatataaaccacgccttgagatccgcgaatatgcttttgcttccagcgacggccagcgcaatactatgggccattgccacgatacacgccttgctgccgtcagatcccttgccgatatgccgggcggccatgattctcgccgtggtccggggtgacatcttgtatatcgtgtagctcttttgggctattcggaaactgatgaaatccagccttccggatgcggccatttggggccttggtgttgtcgcaatgtccttgtgtgcgtttttattctcgttcatgggttttactttttttttgattttacattgattgctttaccgggatcgcgccgtcggtttctctgctcccgtaaggccgccagtttcatacgcgccccttttattcggtgatttttaatcccattcagaattatcatcagttcatcgcggttcaactcaagcgtccagacggtcctatcatcgacagctgcaaatcctttggttatcctttctctcctcttgcgcattccccagattgttcgtatatttgtccgtctgggtatagcatagtgaatatggatgttagtgagatgggcggggctttccccacccgtctctattgttatcccagaaaatccaatgcttcagaatgcaattccaattttccgtcctcgtcgatggttgctattgtccggtatcgggtgccggcggggagcaaccccattttgtaattcttgttgcaggcgaccaaggcgttcagagcctcaacagcccggcgcacttcgtcgaactgctgaagtacacgcccccgcatagtgcttacatcaataaggcgttgccgctcttgatctgcaagccattcggcagacaattcgattttatcgccgttcaccacaaaggcagtataatcgagtgccttctccttgccgaggtgtagcgcttcatgaacgacctgctgcgaattgtctattactttgctaaggtattcaacagcctgatccgtgagcgtttggcgggttgtcacgatatttattttctttgcgtcttcggctgcgatccgcagtgcttgcgcccggatactcttactgttatccgtcgcaatatccttgaggctctcggtagatattttcaaccgtgaagccgtcaactgttgtattgctgcctccagttgaggaatggccgctttgtaggtctcgataattgattcgtaatttttcatagttgttaaaaatcttgttgtacgtttggattattcggcgtcgggcaatgtttccgcccattccgcagcgcgcttctttgcctcttcctcggagtagtcgatggccgtcactccttgggactgctggctttcttgttcttctttcatggttactgtttgatttatatggacctagttttgaaaaggccgccgtcatatccttgttgtatggcgaaaggattgatgcgtaaaacctgagttgcagataatacgcccatagtaggggacatttcaatatccatatcgattatggcccggtagtttgttcggtttattgcatacattccatatttgcgtgcgagtgtgtcaagctcctgcaatgcggataatgcttttaacgcagcattataaagttcgatttgctgcggatcgtctatatacaagttagcggcttcgctaaagacagcttcagcgacttcagaatcaaaagttacctgaccgttactgtctaccgtgtagcagtctgcgggaacagtcccgaatgattcgaagcgcttttgatctttgcggcaaatctcattgaattgctccaacaaagaagtatatagctcctctttttggctgcgttctgcggggaatactatgggggctagtgccgcattaaatttttccgtcatacgggcgcgaatggctgtaccgccgctcataatgtcccgcaagttgtctgcagtcaattcctcgccgaactcggcaaggacggcaggtgtgacaatctcccgtaatttatctacggccgatctgaattcatacattccatgctgaaggggcatttgccctatacagattctcttgctgttctttgacatgattacatgggtaagttggtaaaaggatcaactgccagcgatctatccggggttcgcttttcgccaccctcgatgatgcgctgggttccggcatttattagatttgcgatttgggacgcattatcgtcgccgataccgctggatacagcctcgatgcgctcagaaccattttgtcccgtgtgctctgcgaccatttcgcagacggcatctgcaccgtacttttcggctgcatgcagcatcttttttagtttttcgttgttcatgatgttttaagcctgtttagtttgttctacgcttgtttttcctgctgttttgccagcctcaacaacttacgcgctaatcttttggcctgcgccgggctaaaatgcagcatagcgcagtcgctctgtatgaaatccgtgtcataatcactgacatcggagacgtacagaataatttcgtcgtcgcccttgcgcataccgtggcagtcgataatcgtggtggttgtacggccgagaattagcccaatgccgtgttggttgtcgatcttaattgctttcataatcttttcgtttaaatggttgttatcgtcgttttatcgccgttttcggtcagtctttgtaaactcgtcccgcaaaggcgggtaaaacatacgttttttcatctcctgtttctgaattttcgattttctttcgtgttgtgggtacttgttccacccatgaaatttcatgcgctcaaatcgcgcattacgtcaaaacggctcggcctccccgattgcgtccgccgtattctcgtagtcggttatccgggtcaggctctcgttatgtcgaaaacaaatgcaccctatctccccctcgcggttttttgagatgtgcagtaacccgaccccctcagccggaataatcccgtagcgtcctgcgtcgatctcggtttggccatacattgctggccgatcgaggaatgcgacgatgtcggcgtcctgctcgatggctcccgactcgcgcaagtccgacaatagcggccttttgtccaacctgtcctcaaccttgcgggacaactgcgacaacaggataaccgggatattgagttccttggccagcagtttggccgaacggctggcggcggcgacctcacgctcgcgagtgttgttcgggttacggcttgacgtatcgagcagttgcaggtagtcgataatgaccatcccgcaccgtccccggcggcgcatcgccttgcattgcgagcgtatagccccaatagtgagatttgcccggtcgttgaggtaaacaggcattgcagaaagcttcgcgccggccttctcgatcttcgtccagcccgaagcgtcaacattaccggtgcggaactctcccgaacttacacccgaactgccgacaagcattcgcccggtcaactgttccacgcacatttccagcgaatagacacacaccggaacgcctgacacggccgcagcacgggcaaaatgtagcatcatagcgctcttccccgttcccggacgtccagccagcaccacgagctgcccgccacgccagccgcctgtaagagcgtcgagccgctgcaacccggtaggaatgccgatgcactggccggcctgcctttcttgttgccgcagctccaaattgtcaatagttgcccgaacagcgtcagacagcggtattaggtcgctcacgcgggctgttgtggacactaatgccgcaatctgatttgtgaccaattcgcatatctcctcggcggaattcgttccggcgctggatttggctgcgatttcataactcagcatgataagacggcgccgggcttctatgtctgcgagctgccgagcatgatccaaaacgttgacggccgaccctatcgagttggtcaactcaaccaagtatcggaccatctcccgccccttgagttccggatgctgcgaaagcatacaaagatcaattttattgccctgctccaacattgagagcatcgcgccgtaaattttgccattgtttgggtcagaaaaggccgaaattccgacgatctccgtcacgtcggataattgatccggttcgagaattaaagcgcctaaaacggccctttcgagttcgggcgattccggaagcccctcaacaggggccggacggttataggaaatttgtttttcgcgtttcatggggcgtttgtttttggggtgtggtttgatcgtggcggcgtagccaattcgaagctgtcaagtaggccgatctatttcttcgtatcaacggctcgtaattgtgcattgcctgtaatacctcgcatatttgctcggtcggatatttgtctttcaacttttggtactgctcctcggtcatcggttctttcatctttgcaacccgcggggcgctgtttgttatccacttctgaaatttcaaaaaagattcggagtatttatggggcgcgggggcggagcctcccgcattcataccttcggtgctattatcggcgctcgtatcgtcccccttataaccccctttactatcctctactatactttcctttactttactttcctttactttaggaaaccccggtaaaacccctgtagaatcttggcaaaactctggcatatcctccgtattaccggagttttgcaccggtaaaacccctgtagaatcttgttctgtatttcgtcgcctgtttcgttcagtcattaacggggcaaggcgtttgcggtgagacggagagtatagtttattaccgtcaaggcacagaagtccgattttcacgaggtaattgacgatttcgtccaataattcaaccgttacaccataatccgctgcgagtaggtcgatgattacatcgtcccacacgatttcgaagaaatcgctatctgtaagagtttcaagcaaataattccatacggcataccccgtgtgcgaaaatttacggcgaacagcttttatcttcaaatcgtcgcgcatattggcgtcatgcgaaaaatattccgcattattttttcttggtcttgccatagcgctattgcatttcggattttaacacacgtaaagcttcgattacatcatccaccatatcgggggataagatgatgagactttgcatctcaattggtatgtcgtcgtcgcattcctcgcgcaatgtgataccgccgtttgaattgatgaagatttcaaccgcatttattcctttgaacttatcatcattggaccatacataaaagctcttgttaatcattccgcacctccttccggataaaataccttttaaacctactgccgtgctcgctgggcacccactcgtcgaggatggaaataccctttgccctcagatagcgtatgcagctccgaggatcggataacctcaacacggccgaaatgtcagcgacggaatattttttgcccgactggagtaaattatagacccttttctgatggaaagccaaagatttttgcgtatctttgctgacagggacatcaggggttgccgctgcgtgctcatatcgagtgccggcggcgatcttcatttgatccatacccctgatctattgatggttattcgctgattgggcaatacgcaacgcggcggctgtccgcttatcctccgggcgcgtggtgcgcgcttcgatccacgcaagaagctcttttttcgagaacacgattcggcgtccaaatttcttgtacgggattgtatctttgtagacgtgactatagagcgtagcacgtgtggtgggtatgccctgctcggttaggaaccgtgcggcatcctcgacagtcattccgtcggtttcgacgggttcgttcttgcgccggaagtcggcaagtttaggaagaatggccgacacttcgtcggcgacgatttcgcgtaactgcgcgggagtggtgacgataacggtgttatccatagcatcgtgaagttttaaaaattgaacacttgcccgcgtccgggcgttagtgatcgatcacgatgcaaaggagcaaacaaaaagggcgtcggactaaacgtcggacgtcctaaattttcatttcaaccctattttttttagccattcgtcggcggcctcttttgcagtcgatccggggtctttataagctacagtatctttgggtttggcttctatatttccgcctgtgactgcttcaacaaaggcagcaagggttgttttatccatacgtgcttggagtttcaattcatcaatcaacccccaaactgcagctattcgatgggtacgtggaatggtttgatatttgctgtttttttctaattcatcattactattgttttgctcatacctttttaaaacattatgaaacaataataattctttcggaatatctagtttaatatccttaccacctatatttagatcagtgcatatgtcaagaatatcaataccgaataatattggttggataagtgatatgcgcacaaatccccttaagtcattaggatattgcaataagtaatttcccattgttgtacgtgttggccgttctgtccactccttccaatacaaatttaaacttaacatccgttcatagattcgaaccaatcttttagagatgcgtttgagtagaaaaattcccccttcacggtttgaagaacttaatataatttccaattcttgagtaatatctttataaacgggcttcttacgcgataaattatcatcatcgggtgtgtaaaactcatcccgataagttttttttagacgcccccctgtaagtaaaaaatcatcatacgacatatcaccggcatcgcactctacgattgtatatacgatggtctcaatctgatctaaccatttgaataacttattcatcttgatttaaaatttcgttaatatttccgcattctttacccgttcttctcgctcaaagctggcaagatagttttccgttgttttgaggtcctgatgccccagcgattcggagatataggcaatgtttgcgcctgctcgcttcaacactgtggcgaatgaatgacgggccgtataggtcgagatattgccgataccgagcttttcgcctacctccttcatgcgcttattgatcgcacgggttatgtatagcgttttcatctttcgccgcattgcgtcctccgtgccgtcaaggaccgagaaaatgaagttatcatgccggggagggttgccccagcggtcgatgatcgcctgcatccgctccgtgacaactacccggatttccttgcgggtcttggtcgtgcgttcggtcttttgccggacaaagcatatttcgccgttcacaatatcccggtatctcaacttcacaaaatccgcaacgttaatcccgttgcacaagtagaggaacagccaataatcgcggtatttggccgttgcctcggttccgtcctcatagttggctatctgtccgatttgctccagcgtaagggccagttttcgcccttctccggcttgtatctcataccgccctttaccgaacggatattgcgtgtctttgatcgtccctaaccgttttgcttcattgagaatagctcggaggtggcgcaagtgaatcgcaattgttgtctgcgtcttgccctctttccgcagaaaatcggcatacttccccagccacgacaccgtgaccgcctcgaagcggatacgcgacccggaaaaccgttccaagcctttcagtacattatcataaacaagcatactaccgacgcgtccggcctttttaagttcttcgattttaccccgaaacatcgcatttaccgtatcggacgccgcacccttcaaacgattattaagggcatcgagcgagaacccgccggcccctgccaaatcctcaacagccgcccgcacgatctgatagctgctttcgatgtctttgcgaatcgccacaagtgcacggacctttgtagtcggcagtatttcccattcctccggcgataaatcctttccggtcggataatagttccgcactcgattgtaggtaacacggatttttacggggcacttaccggactttttcgggtgcgcggtatcaaacattgcggcaaccgttacgccgtctttcgagtagttcattttgtgtataaattttaatttgcggtacacaatttacacacaaatatacataattaaatcaaatcaccaaaaacaaatcaagataaaatgactatatttaccactgaaatacagtgatttgcaaaataaaatcaaaatcgctaaaaatagccaaaaatagccgaattacgactacggatcagaaggttacaggtttgagtcctgtcggtgtcacaaggaaagagagtccaaaaggctctctttcttgcatttaaagagccggtgaaaaatgcggcgtacttcttcgagtctcggtttagagcgatttccgtatcgaaatcgggcatttgtttaaaccgatatgtaaaccgaaatcgatcttcccactccaccgttccctatatattcagcccccaagactaaggccgcctcataggacagacaggcgcaggcatgcactctatacgaaccgaccggatgatagattcagccgcaatccggagctggaggcgatttccggttttatttttgcatagccacgggaaacaaacgtatttttacttcccttgatttattttccattggaaatttattttattggaaaatatatcatatctttgtatcgttatcaagataagaaaagataaaataccatacggaccatgaagaaactattagtgacagccgcctgcatcctgacgttcgcagccggggccgacggccagacagacaacaagaatgacaacacaaaacaaacgaataccatgaaaacgatcgcattgaccaaagccgactttctgacgaaagtcgccaattacgaaaccaatcccaccgagtggaagtacctcggcgacaaacccgccctcgtcgatttctacgcttcgtggtgcggcccctgcaaagcccttgcacccgtactggaggaacttgcagcggaatacggggagagcatctacatctacaagatcaacaccgaagaggagcaggaactggctgccgcattcggcatccgctcgattccgacgctgctgttcatccccaaagacggcaagccccagatggcgcagggcgccctgcccaaggcttcgctgaaagaggcgatcgacaaggtgctcctcaataaataagcgggctatggcgcttacgatcgacgaactccgctgtccccagaaccaccgctgtccgctgattccggtctgccccgtcggagcgatctcacaacagggagacgggcttccggcaatcgacccgcagaagtgtatcgaatgcggaaaatgtatcaggcactgcggcaggcaggccgttcacaaaaagccggagtatggacagactgtgtagaatacgcgacctgcagcgggccgtacaccagttcgaagcgaatctggagcggctgtacggaatctgcctgaacgaaggcatgaccctgtgcagtctctcgaaggccggaaggctctcctgcggagagttgagcgacctgctggggctgaccccttcgaacatgtcgaaagtgctccgctcggtcgaagaaaaggaattcgtaaggcgggagctgggaaccgcagacaaacgccagatgtatttctcgctgaccgaccgagggcggcagctgctggcatcgatcgactgcagaaagatcgaaacgcccgaccccattaccgccctgcttcaaaagtaactgacgcatcaaacaacaaccccgtccggaatccggacggggttgcttattttaataaatcagttgataaatatatcaatctgacaaacagacttttaagaagattttacaggggttttagtaacgatttggagaatgtgcgaaattcgctactttgcgtaatcatcttgtcaaataacccttgtcaaaaacaaaggtaggaattttctttgaacttgcaaaaatattcgatttaagtgctaaatacaaaacgaaggcacgaggttatgagcctcgtaccttcttcccttttatttcttgttaccgtgttagatggctttgatgacgaatgggcaataagattaaaatggttttctgcaaattacgaaaaataattggtatatagcctattttccggtaataaaaatgtagcgacggtgtttcacaactctgtcgctaccgctacaactaaaacaagtttttaaccttaatttttatcttcattacaaatgaatacaaaatagttgatatttgcaaatcatctgtccgtttccggtacgagccattcgggggcatgaaaaaatggtatgccgcatgatagtggtcggaaatgcgccggagcccgattcggatgtgtcggatggaaaaaaggactccgtcgtataacgacggagtcccggtttatgagtgaaacggatcggcggggttagaaattgcctttgtccttgcggtcccaccacagacgggtgccaccggtgtcgccgtcgcctttcacttcggaagattcagccttcagcagctggatggcattgttcacctcgacggtgttggagctcagttccgtttcgttgtacagcaggcggcgcgggccgagctgcgtgtcgatgatcgagggggccagattttgcttcggacggaagagtttggggtagcccgtgcggcggtaatcggcccacgcttcggtcgagagcgggaagttggcgatccatttctgggtgatgatgcgttcgagcttttcttcattcgaagcgccttcgtcccacttcaccgtgatactggtggtcggatcggagttgtattccggcttccacgggtccgtataaccctcaggtgaggaggtatcgtcgttgatgtagctgctgatagccgcatcgtcgatagccgcccagtcgggggccgtcagtttcttctcggtccatgctgccgcggcgtcggactgtcggtagctcttctggttgcggatggaaacctcgatacccttttcatagagttcctttacgctctgctgcccggcgtcggtccagcgaagtttggcttcggcgcgcaggaaccagccttcggcggcgaacatgatgggctgcggcgtcgcatatccgccggccagaaacgagtagtagacgcgctggttgtcgttgccgccgttcttattgcccaattcgcagcctacgggaactccgatgtattgcgctcccttgcggatcaggatgtcgctttcgttgtatatgtcctcgttgttctggtctttctcgcctgtcggttcggcggtctccttgaccagatggcggacgttggtggtgaaatagagcgggcggcgcgggtcgttgtagccgttcatgaacgctacgatcgacgaaccgatgcccgaatccagccagtccatcatgcggcgcagttcgttcgagtaggacttgttgataaggatgtccttgtcttcgaggactccggcctgaatggcttccttggcgtatttttcagcatcgacggggtttaccttgacgatgcgcagcgccatgcgcagcttgagctggttggcgatcttcttccagagcgtgcggtcgccgttgcaccagcagtcgaacgatgcgagacctgcggtctccgtatccagtccttcgagcgctttgtccagctgtgcgaatatcgccttgtagatatcttcctgtttgtcgtaggcgtagctgctggggcgttcggccagttcgtccgctgcgaggaccgacgaatagggaaccgggccgtaggtgtcggtatactggagcaggttatacgcttcgacgatgcgggctacggctgcgaagtcatgctgtccggcggcgtcgcactgtttgatcagccggcgggtgttgttgaatattttctgcatgaagttctcgtgcatgccgccgcagaacccgcgggcgaggtcgtaacgcgccatcgtccagttgctgtgcggcacctcgaaataaccgccgtagttgtcgatcgacaacgaggtccagtactggaacaggttctggtgggtggggtaactgaacgagaggggagtggagaactgcgcttcgaacggcagttcttcggggtcgatctcgtagggattggtgttcagctcttcgaaatctcccgtacaacttcccaacagtgcgaggggaagcgccattgcggtaacgtttctaagaatattcttgagtttcataatgtgtaaacgcttttgattagaaattcagtttcacgttcagaccgaagctgcgcgtggtcggcaggttgaagacatcgaagccttgcaggccgttgcccgtacccatcgacacgtcgggatccatcggggcgtctttgtagaagaagaaaaggttgcgggcgatgaacgcaagggtcaggttcttcgactggccgaacaggttacggaaagtgtagcccagcgaaatctcgcgcatacggacgttggtcgcgtcgtatacgtaatcctcgacgttgtagaccgagttgaagcttgtcgcgcccaccacgtcgtagtaagccttgacgttcgagaatttgatgccctcgcgcatcacgtagccgcggtcgcgcgcccggcccgtgcgttccgatacgccgtatccgtcgagtgtggcctcggtcatcgaaacgaccttgccgccgatgcggaagtcgatgagcatgctcagtgtcaggtccttgtagcggaacgtgttgttccagcccatgttccacttcgagttcatgttgcccatgtatttcaggtcggaattctgctcgccgccgtttacggggatctggtagtcggcgccttcgggggtttccgtcaccagtttgccgctctcgtcgcgtttgagcgtgcggacgtagaggtcgccatactggccgccttcatagaggatcactttggcgccgcccaagttggagaccgttacgccgtcttggataccgtcgaaaagctcgatgatcttgttgtcgttgtacgagagattcagatcggtggaccatgtgaattcattgccgaagtcttggaaccagccggccgtcagttcgaagccttggttctggacgttgcccgcattgacgaactgcgatttgtaaccgctctcccacggcagcgtcacctcgaagtactggttcttggtgttggtcttgtaataggtggcgtttacgtgcagacggtgctggaagaactctccgtcgaaaccgacctcgaacgagtgggtcttttcgggtttcagcgtgcggaacggcaccgatttgggcgggttgatggcgccttggtcgccgtaggtatagcgcggattggtcttgtagacggggacgtcgttgccgacgatggagtacgaaccgcggaatttgaacaggtcgatattccggcccatgtccacgaaacggttgagcagaaggctggcgcccaccgaaggatagaagaacgagtagccgtcggtgtaagcgagggccgacgaccagtcgttacgggccgtcacgtcgaggaagagcgcctctttgaagccgaacgtgacagctccgaagaccgagttgagccgtttgcgctccagtcccatggtcgtgccgttcttgtagaaattcgacgggttgaagatgttgggatagtaggcgccgccgttgcccggagcgacgaacttgctctgctcgtagagcaggctcacgttgttcgaacgtgtctgcatcatgctggtgccgagggtggcgttgagcgagaaatcgtcccacgtatggttgtactgggcgagcaggtccgcatagagctgttcgctgaagtagcggttgtcgtccattttgccgtaggtgtatttattgccgtaggacgacgcgtagtggttgcgtacgtagtgttcgtcggcgcgctcgtagcgcatgcggcccgtgagcgaaagtccgtcgatgatctggtatttgatcgatccgccgaattcgtagcggttgcgttcgacgacggggcgttcgcggttgagcagccagtaggggttgctgttggtctcgtcggtggtagtcacccagttctggacgttggcgttgagctcgccgttgtaggtctcgaagttgcttttgtagccgttccagtcgccgccgcgcgggaaggtgtaggtgccgacgagcgggttgaagacgaaaccgccggccggctggttcgagatgtgctggttcacgtatttggcgttgaaatcgaccttgatgtggtcgttgaaaaggtcgaaaccgactttggcgttgagcgtgtgttgcgagtagtcgttttcaggggtgatgccgccggatgttacgttgccgtaggagaagtaggctcgcaggtcttcggcgccgccgttgatcgagatcgagttgttggtcgtccagcccgtacggaagaacttctcggcgtaatcgggagccttcgacgcgagtttgtcgccccaactgtattggccgttcgccccgtatgtgttctggaattcgggcagcgagagcggggtgtcaatggtcgtgttgctcgatacgttcaccgccagacgccctgccatggccgatttggtcgtgatcatgatggcgccgttggcggctaccgcaccgtagagggcggcggccgacgcgcctttcagcagggagatcgaggcgatgtcgtcggggttgatcgtagacatggcgtcgccgccgtcgcgctgggcgccccagttgctgtcgacctgatcggacgtgatgttcatcatcagggggacgccgtcgacgacgaccagcggctggttcgagccgttgatcgacttgttaccgcggaagagtattttcgacgatccgcccgcgcccgtcgagttcggggtaatctgcagaccggcggccttgccctgcagcgcgttgatcatattgaccgacttgatgtcggccacgtcatcgccgccgaccgtttcggcagcataggagagtgttttcgactgacgttcgatacccatggcagtcactacgactgcgttcagctggttggcggtcgtcgtcatcaggatgtccagtgtcgtctgacctgtgtaggtcacctcgtaggggtcgtatcctacgtaggttacttgcagtacgtcgccgggctgcaacccttccagacggaatttgccgtccatgtcggttgtcgttccgcgcgtcgtgttcttcacaatcaccgttgctccgagaagcggcccggagtcgtctttgatcaggccttcaagggtgctgccccccccctcctgcgcgtaggaacgcagagcggtagccggcgcaatgaggcaaaaggacgtcatcagagcaaagcagatgaaaagtgctcggttggttaatttcctcataaataagtgggttttagttgaacaagagtaaagattccggagtgacgccgtatctttggtttgatagaaaaagcagtgttatagcggcatattttaatgttaaaaagtagtgttatgaaatcaaagataaatatattttaattaaatatcaaattatatattaaaaaataatacgtgaagttcagtatgtccataatgatatttcgattgtttatttcactataaatatattgaatttcagcaaaatacacaaatgtctttgtataaattttacgcatgatttattcgtgttatgttaaaaatattaacggacgttatacggataatcatatttgcaaattattctcgttgttatattgaaaaccatctccgctaattggtgaggagtactctgcgttttccgatggtttacgcctaactttttacgcttcgtgtcggcacgaatttctttcgactgatcctcgtcctcggttttttggctatgggctggatttcggcagacacttcggctttaggcttccgcccccgcctttttggaggcactacctgcaggcagtctatggctttcagccgctcgtattcctcgcgcaactcgtcgatgatccgtcggttgttgcttgcaatacaatcgcgcaggagttttacatcttcgcggctgaatccgtaatgtttaatcgtttcgcgcgtcagttcgaagggcgcgttttccagaaccgcccgacggcacaggtaagccaacaaatgcggatattccgttacgaaaatttctaccgtcagctccttgcggctcgtagcgcagaaacgctcctccccgttgaaagggttctccatcaattcccattcgggaaacttcgtggcccattgctcgcgaaaaaaataggcattgaaattaacccggaaagaatcgatgcggctgtcgaagttttcgtaattgtcgttaaactccgcaactgaaaatgtcttttcgtcgggatggctttcttcatcgtccagcgtaatccaaaataccgatttcggagcaccgcacaagattgcatagacaaaatgcgccttctttttcagatcatcgaaaaattgccggatgtcgcttttgcggatgtcgcaatccaaacagtcttgaagcagattccccagcgtataggatttttgtggcatggttcagtagttatgggtttatagaacaattcttaaacgtacgcaaaggttataggcacttcgagaatacaaaataaagggacgaccgaattgtaattgcaataaaataacgattgtctgttaactaatcgtggttggtcatccctttttctattaaaaagacaatgccaaatacgttaggcgatggttgtgtgacagtgatgatgtaagtccgtatcgagtttcggcattgcatttaacaaatatcttaaattacgaactatattaaaaaatgcggaaaaagagtaataatatcggagaatggttcctactaaggtctgttggagacgaatccgtcgatatactctttatcgtgcgcgacaacagcaaaagcctgcctgatgagcttgtttgcgacagcgatcatagcgagttttcccgattttccgttttgcctgagcctcgtataggtctctttgcattgggcattgaacctactggcaggccaagcggcgatatagagaagtcctctagtgtatgcgtctccgtttcggttgatatgccctttgatgtttaccgaagttccggactgttcgtaagtgggacaaattccgagataccgggacacctgcttggcattttggaagtaggtaaagcctccagtagtgatgatgagcgccgtggcaagcgttatgcctatccctttgatggtcgtcagcagcgcgagttgtcggctgaactccacttcgacaagatccgtgagttccgcctggagcctgtcacgcttcttttcaaggaacttgatagtttcgtctacggtatgagttgcacctttgtccgggacaggcagacatgcaagagagccacgaaggttcgacatggcggtaatctgcttagtaagttggcgaatgacggttcttttctgtcggagccgcaggatggcctctccctgtaccttgaaaggacgcgggttcatcttctctccgtacaaggtaatgagtcgtgcatcgctcttatcggtcttgaccgtagagagcaaggctttggcgaagttctttaccttcagcggattctccatgctgacagtaattccggcgacattgagcatatacagcagcaaggcgctgtaattccctgtcgcctccataacacagtggatactgccgtctttggggagagtcccgataaactgtctgataccagcggtcgtgttgttaaaagtacggatctccccgcctttgtcggaggagtaagctaccacgaatgtagccttgctcacgtcgattccaatgtacctcatggccgttcattttttggttttaacgacatcgcttacatcttggtccttcattgcgaatacgggctcagacaccttacgaactatccggattctgatgtaaagagtatggggtcagaacataattcccggtttagaaaaccaatgagagatcggacttattccatactctgatgtcttaactattcaaatttaattaactaattacaaatatacaattgtgagaatacaaaatatatcgtaaaaaaacaggtgcggaaacagtaaagtcagtagtgggaaaatatgaagctaagattcgagtatcccgcacccgttatcgtaaaattgaagtatcgaaaaagaggggcggtaacggactggtacgcctcacaccacgataaacgaaaaagagcatccttcggcttatcgtttccgtccgcccctcggcttccgaaacgcgagcctatggaggcaggagatttcggaagcattgttacagaagaagcaggaaccgcaacggacttacttgacatgatagctacatcacttcccttgtcactctcttttttagcggttcctgcatgatgaaaaacgggtgcgggactgtcgatgaaaaaaatagtgacgcaacttcgacatgaagaattccaatgtcccgcacccagttcggagaacggcccgccgttaccagatttaggtgcctttaaagcgggattattatcgacggcgagcgttctcgttacagcgaatgacggcgccccaccccgcaccaaccgagggtcggcggaacgtgattctttccgattgggagtatatggccgtaacatcgtattattaagggttcgttattaaaatcctcgttccggcctaaacacataaaaaagcacggaacgcaggtacagccccaacggtcggccttgcgagccttggattggtaactgcccttacgcccgtgcccgcccacggcacaaagccgcaggcatgacaagggtttcagacaaattttacaccaatcctaaaacctattatatcgctataatagtcgcaagtttaccgctggtataaaggttgtcctaaccttatgaatatgttacggctatggcgccgttttcatccgcaaaggtaacatatctttttcaattttagttatgcgacccgactgatgccataaaagaatgacgaaacgtgaacccggctctgaagaaccccgctgtcctttacaagaaaggtatgcggcttgcgttacttacgctgcgtaggtcgtaggaaacccgtctgacttcgtaacacaagaggcccacgcccgtcaggtgtagttgccttaaatgtactgccccgtcaaggcgtggtacgacccgacaaggactctcttgttgccgcagactgtaaatttcctacgtttacgcaaacagcaacgcgattcacgcctttacagcggatcgcttgtcccaaaggtagcacaaaaaattcgaatccgcaatatgttgcgggcactttttgtgccgtagggtttatgccgcccgaatagcccatgttctggctttaacggaatacgccgtcctaaaacaacaacgggacggccttttggttccgtcccgctcgtggttacatcttcatcccgcgcctttgctccgtttgttcgatgtcaattcctatccgctcgtaaaactcctttcgttgctgtctgaaccactcgtcgcagtcctttccgtttatggtgaactggaacccgctcggcccgtccttgtcgggtttgaattggagaatgacatcgttcgcccgaaacgtatgattataccttatcgaatgcagctcgcccgtatatctgtaaggttgcatcgtaaacaacgctttggtccgctccttgtccaacccgacatccttgcagtaattttcccatttcaacagcccctttacatagggacacaactcatcgacacgcatcaaggcttttatgacttgttgtgcttcctgtttaaggttggccacctctttatcgtgtccggcctgcatggtcttgatctcttgttgcagttgcccgatgcacttatccttgtcggcaattaccccttgcaaatctgcaatctgtttttcatacctcgcgggcttggggtcgtggaacaacgctccgatcctttctacggctttcgtcgtggcattcacggccacgcctttgagtttgtcggtcttgatctcccgccgcgtctgtgccaactccgtttcggcttttgccagttcttctttcttcttccgccgctgttcgtcgatagcgttgcagtctgtctgtgcggctcgttgctgtgcttggagtgcggcaatatctaccgtgagcgtcttttgctgttctttcagattctcgatctgttcggccatttcatttttccggacgaacacctcgcggtaatactgctgcgtggaaatatgttttgcttccgatccctcgacgccgcgttgcagtccgtatttggccatcgcttcggcataggtggtctggtaggctttgagtttgtcccgtgccatcacatcgtcggcacatagacgcgggcggtctttcttagtgcgataggttctctttccgctttgggcgttcttctcccgctccagcttggcctttctgcgttcgccccgtgtgatcggcacgacggtcgcgtgtatatgtggtgttttctcgtccagatgcaggactgccgacacaacgttttcctttccgaaggtcttttgcagccagccgcaggaatccttggcccaagcatccaactgtccggcctgccggatacgcttcatatcttcggggcttccggagagcatgacacgcaacgcccttacttggttctttccgatcttgcgttccagtcctgcattgtccagccggtgctggatcgcttcggtacggttggtaactcctttggggaactctactaattcttcgttcaggtaggtaagtgtcgttatgacgttggcgggtgttattctccgctcgacgtgtcccgacatggcggcgtccgttccggctgccttctcgatatgcaatacgacatagcccatagcggtatagtttcaggtggtttggataatctgttctcggcggcatcggagcgaagcggataaggattcggagttgtcccggccgtccggcttgcggagttgccgccgcaaggggtgtccagaggggcgccgcccctttggcctaatggggcattttcagcgttgcggagcaatgcggaaagaaaatgccctaataggctatgccttttgtaaaaaggcgcgggcgcgaagcggccgatgggtgggcgacggtgccgccgtcatgtccgtcagcaggggaagccgatgaaagcgaaccgacggcccggaagcccgtgcccctgtgcgcccggagggatcctccgtaaatcccgaagggcgcacaagggcggaagggctgttactccgccagacggtatttgtcgccgaggcgttcggtgagcgccgacatgtcgcggcttatcttttcattggtgatcttcgcgtagatttgggtggtcttgatgttcgtatgccccaacaggcagctgacggtttcgataggcataccctgcgagagcgtgatggttgtggcgaaggtatgccgcgccatgtggaaggtcagtttgtttttaatgccgcattgcttgccgatctcgcgcaggatgtcgttgcaatggcagttgcacggcatataaaagacatggttgtcgagccgctgatccgcgtatttctcgatgatgcgtttgggaatatccagcaggcggatacggctttcggtattggttttcttacgtcgcgtgatgatccacaggttaccgtcgaacatagtttgaaggttgtccgtggtcagccctttcacgtcggcataagccagccccgtgaagatggagaagacgaacagatcgcggatgcgggcatgcgccttgttggccgttttatagttcatcacggccttgatctcctcttgcgagagataacccctgtccacgctttcgggagagttgatatagcccgaaaacgggttgaacggcaggcgcccgtcgttgcgggcaatggcgacgatatgtttcaagacgatcatgtagccccacacggtatttgtgcggcatttcttctccgtgcgcaggaaatactcgaaatcgttgataaaggtaaggttcagttctttcagcgggatgtcctcccggtggtaggtatgggcgaggaactcccgcacgcgcttacacacgcagcagtactttttccatgtggcgacctcacggttgaaacccacctttttccggtattcgacattgtgctgttcgaagagtttcaacagcgtttcctgctttactccgataccgaggtaggcatcccgcagtttggcggccgtgacatagccgtccgactgcatcaactcctgatagcggcggttcacctcgacgcggattttatcgacggcaagattgatttgcatggcctcgacgctcttgcccgtcgcccggccgttcttgacatcccataaacgcggaggaacgtccattttgcaactgaattgtttgacctcgccatctactgtaagacggcacatcaaaggcagatcgccgttggggcgggcgctgcctttcttcacgtaaaataagacccgaaacgtgcttcgcataataaacccgatttttggttacaaagttaatacctgtcgggccgtttgtcaagatgtaaaattgtgcaaaacacagaaaaagaatgtgttacgcttcaatagcgaagtaaattccgcgtaatgatctggtaacgattctttgtcggcgataggctgtaaaaccgtatcgaaccaatttccgcataacgcaaattaacgcgctattaattacaagccaacactttacacctctcgttgcgctatcctgctaatccgctgaaagtttattttaatattctttaatcgtgaaaatattcatatatctcgtcgtagtaatcttcgtataggttttgaggggcgccatatattcgctcatccttggaccattcgaattcccgtaattgtcgccggggttcctcagcacggtaaataatcagacgacgattgtagtcgagttcttttatatcggttactgggcgtgacgagtcattatttatccatggattttcttgcacgaccggagtagactggttgtaataatatacgatcaaacacataatgcaaaaaaaataaaaatccacctaccaacaatcctagacatcctaccaaccgctttctcggcagttctataccaaaatcatcatccttcattttcgccatacttatcagtctttttttacgaaaataagaaatatatgacaatgcagaaatatatgttacgcaaaatagcgaatttcgcacattctccaaatcgttaccgtgacctctgaaaatcctcttaaagtctgtttgtcagattggtattcttatcaactgatttattaaaataaatatcaatcattttacaactttttattatcaattctggcattttaattgaaaatttcttagatttgtagaaactggataacaccacgatcttatggcgcaacgggaactactactcggagacgaagccctcgcactgggcgcgctccacgccggactgtcgggcgtctatgcctatccgggcacgccctcgaccgaaataaccgaattcattcagggtcatccgctcaccgccgagcgcggcgtgcactgcacttggtcggccaatgaaaagaccgccatggaggaggccctcggcatgtcgttcgccggaaaacgggcgctggtctgcatgaagcacgtgggcatgaacgtcgccgccgacgcattcgtcaattcggcgatgaccggcgccaacggcgggctggtcgtggtcgcggccgacgacccttcgatgcactcgtcgcagaatgagcaggactcgcgcttttacggccagttcgccctcgtgccgaccttcgaaccttcgaaccagcaggagacctacgacatggtgcaggcggccttcgacttctcggagaaataccgtattcccgtactgatgcgtctgacaacccgcatggcccattcgcgggccgtggtcgaagtcgccggcgtccgcgccgagaacgaacgctcctaccccgcccaaacgcgccagtgggtgctgatgccgggcaattcgcgcgtaaggtacaacacgctgctcgacgactacgcccggttcgagaccgaagccgcagagagccggttcaaccgctatacggacgcccccgacaaatcggtcggcatcatcgcctgcggcatcgcccacaactacctcgcggagaattatcccggcggctgtccgcatcccgtgctgaaaatttcgcagtatccgcttccggcctcactcgtgcgccgcatggcgtcggagtgcggttcgctgctcatcatcgaagagggacaacccgtcgtcgagcaggccgtgcgcggtatcctgcccgcaccgctcgatattcgcggccgcatgacgggccagctgccccgcaccggagaactcacgcccgacagcgtgcgcgccgcactgggactcgcgccgcacgccacgcacgcggccagccaaatcgtcgtgccgcgtccgccggccctgtgtcagggctgcggccacagggacgtctacacggctttgaaagagattgcggacgaacacgaaaacgccaaggtattcagcgacataggctgttatacgctgggctggctggctccgttccacgccatcgacacctgcgtcgatatgggcgcttcgatcacgatggccaaaggagccgccgacgcgggcgtatatccgtcgatcgccgtcatcggcgactcgaccttcacccattcgggcatgacgggactgctggacgccgtaaacgagcgcagcaacatcacggtcatcatctcggacaacctgacgacgggcatgaccggcggacaggattcggccggcacgggccgtctggagcagatatgcgccggcatcggcgtcgatccggcccatatccgcgtcgtggtgccccttcccaagaaccgggaagagatgaaagccatgctccgcgaggagatcgcctacgacggggtttcggtcgtcatcccccgccgcgagtgcatccagaccgccaaacgccacaacgccgccaaacagaaacaatagggccgacggcactgacggcggcaaacacgcgaccggaaaaaacgcggcaacgaacaccaaccagcaaacaacggaacacttatgaaaaaggacatcatactttcgggcgtgggaggacagggcatcctctcgatcgccaccgtcatcggcaaagcggccctcgacgcaggcctcagcatcaagcaggccgaagtccacggcatgagccagcgcggcggcgacgtacagtcgaacctgcgcatcgcgtcgggcgaaatcgcttcggacctcattgcgcggggcgtcgccgacatcatcatttcgctcgaaccgatggaagccctgcgctacctgccgtggctttcgaaggaggggtgggtaatcaccaacaccgcgccgctgatcaatatcccgaactatcccgaagcggaagccctccggcgcgaactcgacgcactgccgcacgtcgtggcgctcgacgtggacgccattgccaagagcgcggcatcgccccgcgccgccaacatcgtactgctgggcgcagcggcgccgtttctgggcatcgacgccgagaagctcgaagccggcatccgcgccatcttcgcccgcaaaggccaagagatcgtagagatgaacctcgcggcgttccgcgcaggataccaatacgcacaaaaacagaccgaataatggaacggcttccactcgaccgctctgtgctcgactccgcgctggagcgcatggacatcgccgacatcgcgcaggcgaccatccgccagtcgggcgacatcgcccgcatactggaaaacgaaacgggaacggaattcctgcacctcgaaatgggcgttccgggactcccgcccgaacaggtcggcgtcgaagccgaatgcaaagccctccggcagggcgtggcgtcgcagtaccccagcatgtccggcattccggaactgaaggagcaggcttcgcgtttcatccgcgcgttcctcgacatcggcgtcgcaccgcagggctgcattccgaccgtcggttcgatgcagggcagtttcacgctgttcctgctctgctcgcagctggacccgaagaagaacaaaatcctcttcatcgaccccggattccccgtacagcgcaatcaggtgcatatcctcaatatcccgcacgcttcgttcgacatctacgagtaccgcgccgaaaagctgggtcccaagctggaaagctacctcacgcagggcgacgtggcggccatcgtctactccaaccccaacaatccggcatggatctgcctcacggaagaggagctgcgcaccgtcggcgaactggcgagcaggtacgacgccatcgtcatcgaggatctggcctacctctgcatggacttccgcaaaccgctgggacggcctttcgaagcgccctatcagtccagcgtcgcccgttatacgcagaattatatcctgatgatctccgggtcgaagatattcagctacgccggacagcgcatcgccgtcgcggcgatctccgacacgctctacacccgccagtatcccgcgctccgggagcgttacggcatggcccgtctgggcgacgcctatgtgctgacgatactctatgcggcatcgtcgggcacgagccattcagcccagtacgccctcgcggccatgttccgcgccgcggccgacggccggctggatttcgtggccgaaacgtcggaatacgcacgccgcgcacggctgaccaaggagctgttcctgcgccacggtttccgcatcgtctacgacaaggatcaggacgaggcggtaagcgacggattcttctacacggtcggctacggcgatctgaccagctcggagctgctgagcgaactgctgctctacggcatctgcgccatttcgctcaccacgaccggcagccgccagccgggcatccgcgtctgcgtctcgcagctcaaccgccccgaacagttcgacctcttggaagccagactaaccgccttcgggcaaaaccaccgataagcctatgcaattcacgacagccgccgaagccgcaaagctcatccgatcgcacagcagcgtctacattcagggcagcacctcgattcccgaagtgctggtccaagccatgaccgaccgtgccgatgaactcaccgacgtaaagatctactccggattcgccgtcggacgggccgatgccccctattgcaggcccgaatacaaagacacgttcctcgtaaacagccttttcgtcgccaacaacatccgccgctggctggccgcaggttacggccagtcgatcccggcttttctgggtgagattccggggcttttccgcgacggcacgctgcctgtcgacgtggcgatcctcaacctttcgcgccccaacgaggagggttactgctcgttcggcgtatcggccgatctggccgtttcggccgtggagtgcgctaagacggtcatcgcacaggtcaatacggccatgccgttctcttacggcgacgccgtgattcatctttcgcgcgtggcggcggccgtcgaggtcgacgatccgctggtcgaggtcccctcagcgacaccctccgaaatcgaaagcaggatcggcggctacatcgccgaactgatccccgacggcgccacgcttcagatcggcgtgggcggcattcccaacgccgtactggcggctctcacgggccacaagcacctcggcctgcacaccgaagcgatgaccgacggggtcctgccgctcttggaaagcggcgtaatcgacaattcgctgaaaaaggtcatgcccggcacgaccgtcgcgtcgctggccctcggctcgcgccgtctgtacgattatatggattaccgcaaagacctcttgatgaaagacgtggcgtggaccaacgatccgttccgcatccgcgaaaatccccgcgtcatggcgatcaattcggccgtcgaggtggatctcacgggacaggtgtgcgccgactcggtcggagaacgcattatctcaggcgtgggcggtcagcacgacttcatgtacggcggtgcgctctcggagggcggcaaaaccttcatcgccatcccctcgaccaccccgaagggcgaatcgaagatcaaagcgctgctgacgcccggcgcgggcgtcgtcacgacccgccacatggtccagcacgtggtcaccgaatacggcgtagcgcacctgagaggccgcaacctcgccgagcgcgcccgtgcgctgatctccgtcgcccacccctcggtgcgcgaagagctggaaaaagccgcctgcgaacgcttcggttacacgttcctgcggattaagtaaatgcacggagacagcaacagtacgggccgcactttacagctgcggcccgtattgtgttcagcggtctcctgtcgtgcagttcccggcccgaaaaccgggcgaaaacaaaataaaaggcgaactttgcccgttaccacacaaaaaacctgaaaatctatgcactggaaatacctccttttcgacctcgacggcacgctgaccgacccgatgcagggcatcacccgctcggtgcagtacgccctgcggcacttcgggatcgaagtcgaggacctgacgacgctctgtccctttatcggaccgccgctgcgggattcgttccgcgaattttacggcatgacctccgcccaagccgacgaggcgtccgaaaaatacggcgaatacttcagccgtcagggaatcttcgaaaacaagctctacgcgggaattcccgaactgctgtccgccctgcaggcgcagggtgcgacgctggccatcgccacctccaaacccgactttctggccgaacggatcgcccggcatttcgggttccgcgaccgtttcacgctcatctgcggcggaacggcctatggtccctgctcgaccaaagcgggcgtaatccgcgagaccctcgcacaactgcgcatcgacgatccgtcgcaggccgtcatgatcggcgaccgccgcttcgacatcgagggagccgcggccgcaggcatggagtcgatcggcatattgtggggctacggcagccgcgaagagctggaaaaggccagtcccgattacctcgcagccgacatcccggaactgcggcgaatattggggtaacgcaccgaggtcaggcggcaggcagaaacgcaggagtcagcccccggcggtcccctgcgtcagccgcatgacggccggtcggcaaaaaggctcggacggcggagcggatgaaaacagcattgcgccgcttcccatctttcaccgggcacccgcccctacgacacaaattctgcgcagacaaatcgaaacgcctgtaaccacgacaaacaaaagacgcccgcggcaaccgcaggcgtcttcatctatccgaaaacccggagtccccggcagagccggggccgatccgattccgaactatttttcaaatttcatttcgtccagcagccagtccgcctcggcatatttgtcgataatccacatcacgtagcggatatcgacgcagaccgtacgcgccagatcgggatggaaccacacgtcgccggccatcgactcgcggttgccgtcgaaggccagtccgatcagccgtccgcggccgtcgagcacgggactgcccgaattaccgcccgtgatatcgttgtcggtcaggaaattgacgcagagcgtacccttttcgccccagcggccccaatcctcagcggcaatcagccgtttcatgcgatcatcgacccggaattcatactcgtcggggttgtatttctccatataacccgcaatcgtcgagcgcgaatcgtaatgcacgccgtccgacggattcaggggcacgacactgccgtaagtcaggcgcatggtcgaattggcgttgggatactgcgcaatcccttccgaagcgcggaagtcgtagagcaggccggcataacggctttcggccttgcccacctgcgcgcgaacccgtctctcggccttgtccaccccgcccgtaaaccgctgcacccgcaccgattcggtgagtctgaccagcggatcgcggcgcatctcggcgaccgagcggttccgttcgaaataggcgtcataacggtcgggatcgctgcagaacgacgcatcgaacgcttcgcgcgccatccggtcggcatcgccgcccgccgcatcgtacatctcggtcaactgttcgccccacatctcgcgcggcacatgcttcgtgaagttcacgatcatcttcgccaacaggtcgcggtcggtctcgacatcgtagttgcggcgcaggcggccgcttccggcaaccacgctctgcgcatccttcgagtcgatcttcagcgaatccagcttcaggcggtccagcttgccgaggtacgacgacacgcggttggccaccagcagcgcctcgctcggaccgagccacgcctcacggaaatagttgagactgcgttcggcgccccggcggccctcgtagccgcgttcaaggtcggcaagcagcccgccgtcctcggccctgcgcgccgaatcggcttcgatccagcgttgcagacgctcctcttcggccttacggatcgacaccacgtcgaaacggcgcaggcacttgttttcccacttggcgtaatcggcatagttgctcagcccgaaataggagtcggaatacttcatgcgcaccttcggatcgcgctccatatggcgcttgagaatatccatccggtcgtggcggttggccacgacgacgggattcttgacacgctgtttctcggccacggcgaacgacgaagcgtaacggttcgtatggcccggaaatccgatcaccatcgcaaagtcgccgtcgtgcacgccgcccgtcgcaatacgcagtacgcggcggggcttgagcggcacgttgccggcggaatactccgcaggacgtccctccgcgtcggcatacacccggtagagcgtaaagtcgcccttgtgctggggccagccccagttgtcgtgatcgccgccgaaagcgcccagcgtaatgggcggagttccgaccagccgcacgtccttataaacgtcgtaatagaacatcaggtacattttgccgccccacatcgagtagcacgacacttcgtgttcggtctgcgcggcataacggtcctcgatctccttgtacacgcggcgcatgcccattatgccccattttccttcggccatcatgccgttgcggatcgcctcgacctcctcggtcacatcgaccaccttgcgcaggaaccacacggtcttgccggccacgggaatctcttctccgcgcgtacgggcccagaaacccgtttcgaggtagttgtgttcgggcgtcgaaagggcgcagatgtcgctgaacgcgacgtggtgattggttatcatcagcccttcgtcggagatcatgcttcccgttcccataccgccgtccacggcgactacggcgtcggcgagcgccgaagtctgctcgttgtaaatctccttgtcctttatcttcaaccccttggacttcatctgagggtaaatctcccccagccggttgatcagccacatgccttcgtcggccacggcggtctgcatgcagagcagcacgacggccagacaggctatccatcttctcatatctttcatcttcataaaacgggaggaaaccgtcagccgatcccctcccggtcattttattcggttacggtcttgcccggattggtgaacttcagccgcggatcggcctccttgaaggtcccgtcggccatgcggagcgtccacttctcggcttggaaaatctccttccagagcttctcgtcgttccacatcgacttcacatagtgaatacgcatgacgggcgtcaggtcgcgcagcacgaaatctacggagacaatgccctcggagcacgaaaggaagctcttgaaataggggaacgcattgcggatcggcatcttctcgataccggggaacgccatttcgtagacagccttcgggaactgttcgtcgtcgccccacttctcgatgttggcaatgaacctgcccgcctgcttctccacgtcgcggaacatgatctgcgcgaactcctcgcgcgaaacctgcccggcgaccgcatagctcttgagcacggtgtgcatcggaatcaccttttcgccctccttggccggaatcaccagctcttcggcgtcgatcgcctcctcgaacatcttttcggtaatgccggcggcgggatcggcgtagaccgtcacatccacggggcaggcgaattcggaggtgaagccgtatacgccctcgatcttctgcagcaccatgccgaagtagatcatatccatccggtcgtggagtccctcgacgccgagtttcaccacgtcgagcatcggcacgttctcgcccggcatggcgtatttacgcagcgtcggagcgaaaatcgcggcctgaatcttcagcgtgtcggtcttggcggggtcgaacagcacctcgacgccgtgacggcggacgaaggtcttcacgccgtaaacacccggcacggtctgcatcttggccgagaaggccttcgaagagccgaagcacttgatcgtctgcaatccctccatctcgaaggtctgcagattctcgacctgctcgtaatcgccccatttctcgtcgatcgtgggcagctccatcgtggaacccatccacacagcgatgaagaagagcacgacggccagcagtcccggcacccagcgcagcgaacggcggccgttgacctgcagggcgtccttcgtacaggagccgatacagttgccgcaaagcgtgcaatcgacgtgcttcaccttcacgtagtcgtggatcggcagctgataggggcactttttctcgcagagaccgcagttgttgcaggtgcggatgtcacgctcgatgtacatcagcgggaagacgcagctgcgcatcttgacgatctcgacgacatatgcggccagacatgcgccgccgatggtccagatccatgcgtccgcaacgcccagcatgccgagaatccagccgccgagggccgcgatgacgaacagcagcgtgaatttgaaaatgttgctggccgcccccagcgggcagatatacttgcaccagaacatcttcaccacgaagccgcccagcagcaacagcgtaaggctcgtgagcgacatccagagcacgatctcgcccttgaatcccgtagccacggcatagaacggatcgagtttcttgcagaacagctcgctcgacgagagcgtgaaatagaggatcgtgaagagcagcacgtacttcaccacgcgcagcagtttgtctacgatgctgcccgacggaacctcgacctgcagatgcagtttctttccggcgcggcccatccattcgccgacggtgcccagcggacagaggtagccgcagaaaagtttgctgaacaggatcactcccacggcgagcacgaggcccatcatgatctggagcatagacatcgagcaggccagcgagttgttcaccagataggttccgaaagcctgcagaccgccgaagggacagtaagcctcgacatcgacgggtttttcgctgaagttggcccagagcaccgtgcctgcaatggcggccagtacgccccactgcaggatgtgcttcaggtaattgggtttgcgtttcatgtatcgttaagtattgtgtttgtgtgtgcggagcgggttattccctgtccttgatacagcggacgggagcggcgcagtaaccgccttggtatgcgaccgttatacggttgaaactcttgttgtaggtgatcatgccggcataatactgaatgttcttaatgccgctggccgggtcgtcggccgtattgtaggtaaccttatagccggtcgaactggggaaataccccatgccgaacgccgaggcgtcggcagccgaggctgtcgccatataggccggagtcgccgtgacatttgccgcattgacataaccgcagcctgcgatgttaaacccgtctttattgagcttaacgatcgaaccgccgctctgcgtctgttcgaaatagggcgacgtcggatcggtgaggttgccgctgccgacacccgccagtttgagccattcggccatcgtcgggatatgccatccttcggggcaaataccccgcgccccttcatactggtcgaaattgtcacccgtcatgtcgccggtcatccccagcatcaccggatagctgtacagcagaccgttgctttcgacgagcgacggatcggccgctttagacagattgcacggataccatacgccgctgccatccttcgggtcgctcgatatggttttgccttcgggcacgtagcgcaggttttcggccatccacgtacggccgtccttcagggtcacgatctcgtacttcacgccgccccattcgacggtcggggtctcgacctcgccttcgccgtccggcagcaggtcgtcgccgtccacccagcccgtaatcggaccgctgaacttcaactcgatgtcggccggctgcacgttgcactccatgcggcggttctcacccgacttgaagtcggccgtaccgagcgtctgcgtgcgtttcttgccgtcggccgtggtgacggtaaccatcagtttgacaccgttctgcggcaccagaagcgcatagtagactttgttcgcagtcgccgtattggcgatcaggtcggaagcctccgcgtccgctttggccgtaaagttgcccgtcgctggatcgagtacgcccgtccccacggcgcccttgatgacgatattcgtaatatcgaaacccgattcgttcgtcacgtcgataacgatgcgcgacatcttgtgcttgaaagtcatctgcgtggacgacagcgtcggcttgacgcccgccttcacggccacgatcaggtccgaagccgtgtagttgtcgccgctctgatcggccttgaccgagaattccgcgggaatatccccgccctcctgccaaggataataggcgaagagcgtcgaggtcgcattgatgtcctcataccagaggaatccctcggtcttgaaatcggtgccgtcgaaagtcatcggtttgttcgacacgaaatccttgccgtcggcggtcatcgtaaccttcaggccgaccttgtcgcccagttcgaaatcggtatccgtggcgcgcgtagaggcggtcatggctgccggcgtcagcgaaggattgccgatcgtcggagtgatacgcagcgtccggtcgcccggaaccccgccttcgttcttcgagcaggcggcaaagcacactgccgcggctgccgcaatcatcaaaatctttttcatagctctatccgtttaagttaaaaattatatcccacactcaccgtcgcccgcacccggttgggctgcgcgacgtattgcagatcgaacccgtgttcgtagcgcgcatacagttcgacgtagaaccgctcgatgttgcgccgcacgcccagtcccgcccccagccgtttggccgtcaggtattcggtttcataattgtaatatccggtcagttgtccgggatactcgcccggctgctcgccggaggtctcgaactgtttttcgcactcctcgaagccgccctgacggtagtcggcggcgagggtcacttcccagaacccgaaggcgcggatcagttcggcatagactttcgtaaagtgcagcttctgccccttgacatagggatacatcagcgtcgattcgcggttgagctgcgaataggccacgccggcgcgcaggtccgtataacggtttgcaaattcgtactcgccccccagatcgagccccttgcgcccgaagatgggcgtcgagccgtgaatgtagggcttcgtcacaccgttgacggtctccgtcgtgatgatgttctcgtcggtccggagcgaccgccagtcgaggtgcagccgcacgaagtgcctgcgctgcaggtttccgagcgaaagggcggcgttcgccgtcacctgatgcgtcccgaactcatgccagatcatgccgcgctcgcccgtctcgccctgccggttgcgatatgcggcagcggcatagaccggtccgtactgcagctgcacgcccgcgccctgcgtattctcccggacgggaaatcccgtgacgccgctggtcgtgaggtgcatgtcgctgctctcccaaagctgcagcgagccgtaacccagaccgcgatcgaagaaagcctgatacgattcgggcgtggagccgatctcctcggcttcgagtttttcgctgttcgtgcccacgatatagaccgcgcccgcggcgaaacggcccgcatggtacatcacgccgggcgagaattcgaagtcgagccgcgtgttcttgtgacgcaggtccttgcgcttggcatagttctgcgcttcgaactccacgcgcaggccgcccgtccagcgtctccccagcacggccgaaacgccgcccgtgaaggtatagtcctcgcggattttgcggcccggcgtaaattcgagaatatccacgggataatagcccggttgggtgaacatcgaaccgcacatgttgcggccgtcgaaatagtcgtatccgaagccgcccgcgaaagagacctttttcagatggcgcaccgactcggtccgcgcgccggcgttccagctgtcgtccgacgacgaatggccggtcatcccgccggtctccttggtgaaatagatttcggcataggagcggctcaggctgtcctgccggatgcccgcggcgttcgggccgccgttccacggattgcggcgaaaaacataatcgaaacgctcctgtgccgcggcgcctgagacggcaattatcatcagcagtgttaaaatccgtctcataggctattcacgcaaagattgtgtctcacgctcgtaaaaatcgttcgacgaattgttggtatccacatatcggtcgaatccggcgctcgcagtggcctcttcgtccagcctgcggtagaggctgtgtccctgcgccttggccgagaatccgacgtatccggcgtccacatcggtatgcagacgcttgtttctggtcgcttccgacaggttgcagacctcgacgccgtctacgatccactcccacggaattttcgaatagacgacgctgccgctggcgatcgccgattcgagatcattggccagataggcgtccagatcgaaatcgccgggcgcccggaaaaggatcacggcgggcgaattctgcgatatcacatagaccacggccgtattcgttccggtttttttcagcactttcatatagtgcgactcatcgatctgatcgcccggagtaggcgtgggatgcagccggttgccgggataatgcaccatgtcgtaaagcacgaagtagcctttccggttgagattcaccgactgggagtaggtctgcgtgtgatctacgccgtaataggccacgacggcctcttcgcccggctccaacgggaaatccgtgcccgtgccggggaacatccagatacagtccggcatggcggcgtagtcgcggaaaacgatgttgcccgaagggtccgtactcgtccacggattgttggcgttcgagttgtagggcgcgaccatacccagacaaaggccgtcgaggtagtaggtgtcgaaactgttgttgtgcaggacaatatacttgtcgtcggcatacgaaccggtcgcaggcgggtcctgcggacagccgcccgaatagatctccttgatgaggatcgtgcccggcttggcgtatttcaactctacgctcacattccggtccgcgccggcgaggtccacctgttcgacggcgccgttgaagaccgacgacgcatcggggcggtcgagcaccgaaagccggtaatgcccggcggccacgtcgaaggccgccacgccgcgcgcatcggtcagcgcggtgtagacgttgctcgaattgcggtcggtgagtttcaccggaacgccctcccgcaggaaggaggcgtactcttcggggtaaacgacctgcacgctgagcgaccgcagcgtatcgccgtagggattgccttcgaacgacgtgcagccggcggccagcaggcaggataatatgcaaaatagctttttcatcgttttcagaatttaagacgcaccgtcaggccgtaatagaaatcgggcgtaaagacgaccttgactcccgaagcgtacgacgcgacgaaaggccgggaattggtgaagttattggcataaaacgagatggatacatgatccccgatctccttggtgatgctcaggttggccgagaaatagggatcgtacccgtcgccgttgaacgagtaggcattgcccgaacgaagcagcagggaggagaaggccggatcgtttttctgggcgtcggtgaagggatggcggttgccgtcgaggtcgaggtaggccacgggccagatcgccgtatagctgttgccgtcgtatatgctgccgcccgtgggattgcggtcctcgtccgcgttgaaggcgtattcgcggccgtcgtactccgaaaggttctgcgaacgcttcaccagcgaagcttcgagtcggagggtgacgatcatgcggatcgcgggcacatgggtcgtggccgtgaggttcgcatccagcgcatgggtcttacggccgttgtaggtcacgacggagctgcccccgttgtcggcgtaaatacccacgtaggggaagaattcgccgcccgtcgtggtcgaaggataataggacgcctcgcctttattgacgtatttggtatagccgtaggcgccgtccagccgcagctgcgtgcggataggattgatctgcgggaaatcaacgacgaactccagacccatgcggtccacgggcgagccgttgtcttggtaggtattcttgacgaaggtgcgcttggtggaagtcgtctccatggcgatccatccggccgaggggtcgtccttgtcgcggacgaagatctcacccgtctggctgtccaccctgaagagcggattcgacggcatctggaacgaggagccgtcgggcatcttcgagggcagccccatcaccttgtaggagaacggctcgtaggcggcgctcagttcataggggtatttggtacggttgaaatagccgaccagcgaaaccgaagtgccgccgatacgcagatcgacgccgacctcggcgttgcggttgcgctgccagcggaggttgtcgttgtagagtatctggtaaggctgcgtgtgatagacgtacacgctccggttcgggctgtaggtgttgctgaacacccgcgtatcgcggtattcgggcagcggatagaggacgttgaaggacggcagtttctcggtgataccccagccgccgcggacggtcacatggtcgttgatgcggaacttcaggttcaggcgcggcgaaagactcgacgtattttcatactgcgtattcttgataaaggtcttttcggcgcgcacacccgccatcagctgcagcgaggtcgttcccagcggcacggtcagcgtctcttcgaggtaggccgcgaggttgtgcatgtagggaatatcggtataggggcgggggcggtacccgtcgggtgcaagggggggggccgcataatactctccctccccgacgttgccgttggcgcgccacgacgcgccgatcttggcattgctatgcacgtcgccccagctgcggacccaagtggccttcagattcgccgcatagtcgagctgcttggagtcgatattgcgcgtcgtatagaaagtcgccggaagcatttcggcgatataatagccctcgctttcggcatggacggccggggtctccgtggccgacgactggtaggtgtgcctgcgtgcgagcttgtcggcatagctgagcgaagcatcgaaatcgacgcacgtgatccacggtttgttgagcagccatttgagcgacgtattggcccgcagggcgttgtcgcgcaccttctcccactcgcccacctgcgcgtcggggtcgtcttcggtattcatgccgccgatgttggccgtcacgccgaaattgaaacgcagaaccttggcgaaggtgttctggtaattgagcgcaatgcccgtgcgcgaataggaactgtagggcgacgtggggttcttcatggcccgcgtgtactccacgctgctgttcagcacgccgcggtcggtacccagatcgaaacccttcgaggcggagatttgtttggtgcggggattggtcgagagcaccagcgtatagggcgtcttgcccttgcgggtcgaaatcttcaccacgcccgacgagatatcgccgtactcggccgaaggcacgcccgtcaccacctcgaccgactcgatattcgtcgaagcgatgttgcgggtgctcgcgcccgacatttcgcccagcgaagcgttggtcgagatgcgcacgccgtccacctcgacggccgtgccgaacgaggcgtttccggccgcggaaccgccgctgcgcagcgaaaagacattgtctttggtcagatcgggatttatcgtcttgccgcccggcagcagcgacgaaatatccgaagcgttcaccatttgcaggtggtcgatggcgttgccgccgatcgtccgcgaggtggccatggcattgggcgcctccttggccgtgacgacgacgctttccagtttcagattgtcctcaggcgcatagagcaagatacgccccatgccggcgcggacgtcgagttcggtttccgtggtcgcatatcccagacacgacaccacgaaacgggtcgcgcctttgggcacgcccttcacggtaaaattgccgtcgccgtcggccacggcccacagtccggcctgcggcagctcgacgacagcctgagcgatcggtttgtcggtgcccttgaccagcacccgccccgataaatcgtaacgctgcgcccaaactacggccggaattagcgtgaataacagtagcagaagtttcctcatatgattgacctaacgcaacaaatataactaaaatgaatattttttgtgcattttcaagcgtttttttaaccatttcaacaatttttacgggcaggagattcgattccgtccggctcggcaaagaccgtttcgccaaatcccccatgcgttccgcacggaaatacctgcattacagcgaaaacggacggcttataaacataggtcccaaagattaattttatttttacagtactatgtcgcacaaagtataaatattttacctatatttgcgcttatcaaccgacggtttattggtgtttagtaattttttattgattttcgataaaaacaaattgtttttcaagaatattttaatacctttgttcccgacgccgtttccctcggcttacagatcgtaactacgcaaccttacaaaaccgctttacaacggcagacagaatatgataaagctggaaaacatcaacaagacctacgacaacgggtcgcccctgcatgtgctcaagggtatcgacctcacggtggaaaagggcgaactggtctccatcatgggcgcatccggatcgggcaaatcgacgctgctcaacatcctcggcatcctcgacgactatgacagcggcagctactatctggccggccgcctgatcaaggatctcagcgagacgcaggccgccgcggcccgcaacaacatgatcggctacattttccagtccttcaacctgatcaactacaagaacgccgtcgaaaacgtcgccctgccactctactatcagggcgtctcccgccgcaagcgcaacgccctcgccctcgaatacctcgacatgctgggcctgaaggagtgggccgaacacatgcccaacgagatgtcgggcggtcagaaacagcgcgtggccatcgcgcgggcgctgatcaacaaaccgcagatcatcctcgccgacgaacccacgggcgcactggacagcgtcacctcgcaggaggtgatgaacctgctgcgcagcgtgaacgtcgacatgggtatgaccatcatctgcgtcacccacgaacagtcgatcgccgaccagacggacaaaatcatccgcctgacggacggcgtcatcagcagtatcaccgaaaccggactggcaacgcgatgagagagctgctgctggagatatggacttcggtgcgccgcaacaaactgcgcacgttcctcacgggattttcggtcgcgtggggcatcttcatgctcgtcatcctgctgggatcgggcaacggactcaagaacggcgtgctgtcgaatttcggcaactacgccaccaactcgatcaccatctccggcggctggacctcgaaggcctacgccggctacaacaaatggcgcagcatcgacctgaaaaaccgggacctcgaaattctggtcaatgaattccccgaagtggacgacgtcgccgccaaagcgtggtaccgcggctccacggccacctacctcgaccgcttcgccgacatcagcctgcgcggctcgctgcccaagatccagcagatcgaaggcgtcgagatcgtcaagggacgtttcatcaatcaggccgacatccacaactaccgcaaggtgatcgtcatcgacgaggcgctcgaaagaatactcttccgcggcgacaacccgctgggcaagccggtcaaaatccacaacaacatctaccgcgtggccggcgtctacagaggcgacgcccagcagcgcaattcgatgggctacatcccgctgacgaccggccagctgatcttcaaggccaacgatccggtcgtggacaacgcgatcatcaccgtacacggactcgacaccgacgcgcagatggaggcgttcgaacagcgcatccgcaaacggctggccgccgaacaccactacgatcccgaagaccagagcgccctgtggatacgcaacacgatggagcagtacaagagcatgatgatcgtcttcggcggcatcaacctcttcgtatggatcatcggtctgggcaccctgctggcgggcatcgtcggcgtgagcaacatcatgctggtgaccgtcacggagcgcacctccgaattcggcatccgcaaggcgctgggcgccaaacccgtgtcgatcatccgcctgatcctgaccgaatcggtgatgataacggccatgttcggctatatcggcatggtgctgggcgttgccgtcatggaggcggtcaactatgtcatcaaccagacgccggcccagaccggaaacttcggcggcagcatcttcctcaatccgacgctcgatctgggcgtggccgtcagcgccacggtcgtactggtcattgcgggcctgatcgcaggatacgtccccgcctaccgggccgcacaactgaaaacgatcgacgccctgcgttataataaataaggagccatgagatttttcgatacggaccgctggaacgaaatctggcagacaatcagccggaaccgcaagcgcagcatcatgacggcgctgggcgtattctggggtatcttcatgctcatcgtactgctgggagccggcatggggctgggacgcctgttccgcgcccagctgggcggcatgtccaccaacacggtgctgctgcaaagcagccgcacctcggtcccctacaagggcatgcccacgggacgctggtggagaatggacaacgacgatctggaagccgtcagcaaactcgaagaggtggagtacacctcaggcgtcatctggggcaacgaactccactgcagctacaaagagcgcaagggcgactatcagatgatgggatacacgcccgactaccagaagatcaacccgcagaagatcatcgcaggccgttacatcaacgaggtagacatggtgcacaagcgcaaggtctgcgtcatcggcacgcaggtgcagaaagacctctttccgggcgaacccgacccgacgggcaaagtcatcaaggtcggaggaagctacttcaccatcatcggcgtcatgcgccgcgaatcgtcggccatgtcgttcagcgacgtcgaacgcacggttgtcgtcccgatctcgctggcgcagcagatgttcggctacggccgcacgatacacctgctggcgctggccggctacaaggacgttccgagcaaacaggtcgagaaagcggcccgcgaagccgtcttcgcccggcacatgatctcgccggacgacgaaaaggccgcttggaccatgtccgccggagagatgttcgacaaggtgatgagcctgttctggggcatcggcctgctgacgtggatcgtgggactgggcacgctgctggcaggtatcgtcggcgtgagcaacatcatgctggtgctcgtgaaggagcgcacgcaggagatcggcatccgccgcgcgctgggcgccccgcctacggccatcatctcgcagatactttccgagagcttcatcctcaccttcatcgccggaatactggggctcacggccgccgtcggcgtgctgtcggtcgtggattcggtctactatcaggcggtcaccgtggcgcaggaaggattcgaagtgtcgtggcagatctccttcgggacgggcatgctggccctcttcatcctgatcgcaggcagcctgctggcgggcgtcatccccgcataccgggccttgagcatcaaggcggtggatgcaatacgcgaagaataaacgattaaacaaacagattacggctatgaaaaaatttctgaaaatctttctgggagtgctctttgcggcgctgcttctcggaacgttctggttcctgtggcagaagacccgccccgtaaaggtcgtctacacgatcgtgcagcccaaactcgacacgctcaaacagtacgtggtcgccacgggcaaggtcgagccgcgcgacgaggtgctcatcaagccccagatttcgggcatcgtctccgacgtctacaaggaggccgggcagatggtccgcaagggcgaggtgatcgccacggtgaaggtcgtccccgaaatgggtcagctgtcgagcgccgaatcgcgcgtctcggtggccgaaatatcgctggaccagacccgccgcgaattcgaccgcacggaagccctgcacaagaagggcgtggtgtcggacgaggagtacgagcagggccgcaccgcgcttcggaaagcgcaggaggagctgcagaacgccaaggagaacatggagatcgtcaagaacggcatcaccagccgttacaaggagctgagcaacacccagatccgttcgacgatcgacggcatgatcctcgacgtcccggtcaaggtcggaaactcggtgatccagtccaacaccttcaacgacggcacgaccatcgccacggttgccgacatgtcgaacatgctcttccggggcaacgtcgacgagaccgacgtgggcaagctccacgagacgatgcccgtcaagctgaccatcggcgccctgcagaacgtcgagctggacgccctgctggagtacgtttcacccaaagcgaccgaagacaacggcgtcatcatgttcgaagtgaaggcggccgtgaagattcccgaaaacgtcttcgtgcgcgccggatacagcgccaacgccagcatcgtgatccagagccgcgaaggggtgctgaccctgccggaaagcaccgtcgaattcgagggcgacaaaacctacgtctacctgctcaccagcgccgacggggccgaggagcagaccttcgacaagcacgaggtcaagatcgggctgtcggacggtatcaacatcgaactgaccgagggcgtgaccgccgagagcaaagtccgcggcgcacgggaagagaagaagaaataaccacaaatgcatcgcagcatgaaaaccagcaccctattcgccgccctcagcgcggctgccatgacgctctgtacggctgccgccgcggctcagacggtacaggccgcgccgcaggccgcaacgccggcgcccggcacgccgtggtcgctcgacgactgcatcgggtatgccctgcacaacaacgtcggcgtacagcagcaggccctgcaggtggagcagaccgacgtgaaactgtctacctccaaatacagccggctgcccgacctgagcgcatcggtgggctacaacgccaccttcgggcgcggcacctccgacgacaacatccgcaagacgggaaccatccagagcggctcgttcgacgtcggggccagcatgcccctcttcgacggattccgcatcaaccgcgaaatcaagggcggcaagctcgacctcgccgccgccatgcaggatttggaacgcgcacgcgaagacctgtcaatcaacgtcatgacgctgtacctgcaggttctctacaacaaggagctgacccagatcgccgaacgccagctcgaactgagcacccagcaggccgtccgcagccgcgagctggtcgccgcgggcaaacagcccgaatcggcacgctacgaaagcgaagccctgcaggccaacgacgaactgaatctgacgcaggcccgcaacgacctgcggctggcgctgctcaacctgagtcaggccctcaaccgcgagagcgcggcgggattcgacatcgtggcgccgcaattcgacagcgtggcgctcgcatcgctgcacatgctcggcacggccgacgacgtctatgcctatgcgacggagaaccgcccccacatcaaggcggaacgcctgcggctcgaaagcgccgaaaatgccgtccggatcgccaaatccgcgctctacccctcgctttcgctgcgcggaggctacggcacgggcatctacagcacgcaggaggccgccttcggcacccagttccgcaagaacagcagcgagttcgtcggcgtgtcgatgagcgttccgatcttcaaccgccgcgccacgcacaacagcatcctctcggcccggatagccatgcgcaaacaacagctggccgtgaccgacgccgagcaatcgctgcgcaaggagatcgagcaggcgtggtacaacgccgacgccgcctacgggaaataccgttcggcggacgccgccctcacctcggcacgggtggccttcgcctacgaacagcagaaggccgacgcaggccgttcgacggtcttcgacttcaacgacgccaaaacacgtatggaaaaggccgagtcggaactcgtgcaggcgaaatacgaattcgtattccggtcgaaaatcctcgacttctaccgcggccggccgctcgaactatgacaaacagccgtaaacaagctcgcaccgaataaacaaattagggcggtcgaaattcgaccgccctattgctgtccggaataccaatccctcaagtattccgacagctgccgggagaggctttcaggctcctacccggcgcagaagcccttttgcgtcactaataccctcttcgtcccctgtgcgaagcaggatgaaacaaagatatgaaaatattccgaagctgtacaccccgtgagcgtttttgccataacttacggctgaaatgattcacacgaatggacgaaaatgttgcatacagtctctttcagccaacaaaacgttcggcaaagaaatggctatctgaaaaatttgccctacttttgcaactgaattacaaacggtaaagatggagtggctaaaaagtttattcgtcgaacattcggcgctgcaggccgtcgtggtgatctcgctcatctcgacgatcggcatcggactcggtaaaatccgctttttcggcatatcgctgggcgtggcgttcatcttcttcgccggcattctggccgggcatttcggactcacgatcgacccgcagatgctgacctatgccgaaagtttcggactcgtcgtcttcgtctacgccctcggtctgcaggtcggccccggtttcttcaactcgctgcgcgccgacggactgcgcctgttgtcgccggcggtcgccgtagtgctgatcggcaccgcgctcgccataggcatgagcttcacgctgaacgtctccatgcccgacgcggccggcatcctctgcggagccacgaccaacaccccggcgctcggcgccgcgcagcagacgctgcagcaaatgggcatcgaccccaacggcgccgccctgagctgcgccgtgacctatccgctgggcgtcgtaggagtcattctggccatcgtcttcatccgcaaggtcttcgtccggccttcggacatgcccgaaccggacgccgagcaccgcaagaacgtcttcatcgccagctaccacctgaccaaccccgccgtcttcggcaagagcgtccacgagatcgcctcgcaaagccaccaccacttcgtcatttcgcgcatctggcgcaacgggcgggtgtcgatccccacctcggacaagacgctgcagaaggacgacatcatcctcgtcatcaccgccccgtcggaagccgacggcctgcggctgatcttcggcgagcaggaactgaaggactggaacgcggaaaacatagactggaacgccgtggacagccagctgatctcccagcgcattctggtcacgcggcccgaaatcaacggcaggaaactctcctcactgcgcctgcgcaacaactacggcatcaacatcagccgcgtctaccgttcgggcgtgcagctgctcgcaacgcccgatctgcggctccagatgggcgaccgcctgacggtcgtcggcgaagccgcggcgatccagaacgtcgagaagattctcggcaacgccgtcaagaacctcgacgaacccaacctcgtggcggtcttcgtcggactgattctgggactggtgctggggagcatccccgtcagcattccgggcatcagcctgcccgtaaagctgggtctggcgggcggcccgatcgtcatcggcatcctgatcggcacgttcggtccgcgtctgcatatgattacctacaccacctacagcgccaacctgatgctgcgcgcattggggctgtcgatgtatctcgcctgtctggggctggaagccggcgcgcacttcttcgaaacggtcatgcgccccgaaggggcgttgtggctcctgctgggattcctgctgacgttcgttcccgtcgtattgctgggcgtcttcgcgctgcgcgtcctacgcatcgatttcggttcggtatcgggcatgctgtgcggcagcatggccaacccgatggcgctgacttacgccaacgacacgatcgaaggcgacaatccgtcggtctcctacgccacggtctatcccctctgcatgtttttgcgagtggtcatcattcaggtgatgctgatgattttcctgtagattgcggccctgcggcctgctccgggttcggctacggcgtcggctccggcttccgccccgactccggctcttgcttcggcatcggttcctgcgtaggcatcggttccggtttttgcttcggcttcggttccagcttcggttccggcgcccggccttgcccccttctctgctccattttccgccccattcccggctccggcttcagataacgcagggccgcaatgtcgctgcccgacggattctggaatacccgcaggtcgaattcgggaatcacggccagcacgtggtcgaaaacatcggactgtatccgctcgtaatccacccatatcaccgtatcggtaaagaagtagagttccatcggaagtcccgtctcggtaggctgcagctgacgcaccatcagcgtcatccctgcgttcacgggcacttcgttgcgcagataacgttcgagataggcccggaagacgccgagattggtctgatgcaggccgttgatcctgcgttcgccgggtttgatgccgtgcgtggcattgtactcctcgacgcggcgttcggtatcgtcgatatattcgcggatcaggtcgatactgcggtatttattcagcatctcaggcgtacagaaccgcacgctggtcatgtcgatactcaccgagcgcttcacgcggcggcctcccgacgcctgcatgccgcgccagttctggaacgaatcgctcaccagcaggtagggcggcagcgtaacgatcgtattgtcgaaattgcggactttcaccgtcgtgagcgacacctcgatcaccgagccgtcggccccgtatttgggaaccgaaatccagtcccccaccttgagcatgtcgttggccgaaagctggatgccggagacgaatcccagaatgctgtcgcggaaaatcagcatgatgatcgccgccgacgctcccagaccggccaacagactggcgggcgacttatcgatcaggatcgaaacgatcagtatgccgcagatcagcgccgcaatgccctgcccggtctgcctgagccccttgatcggcttgttctgccatgcgggacgcgccgaagcgatttggaaaaccgcaaagagcacggcattgataaagcggaataccgccacaacgatatagacctcgaccagccgcgtcactatcgtccgggcttcggactgctcttcgaaaaccaccggcagaacgatccccagcacgacggcgctgacgacgttgcacaaacggctcagcacatcggggttgaacagatcgtcgtcccacgtggctttggtgcgcttgacgatgcgccgcatgccgcgcacgaggatcgtgcggcacacgaagtcgaagagcgccaccgccagcagtaccagcgtaaaggccacccagcggtcccagccgctgtcctgcgcggacgcgagtcccagccattcgagcagggcgtcggcccaatgtttcaggagtgtctgcatacggcattcctatcaattatcagacccgttcgtgaaaaatgattccgaggtcgtcgttttacaaaaaaagatgtgcgatacggcggtgccgcacctatccggcatacgttccgccggcatcggcccgccccggcggcgcggacacggcgcggatgcaacacgaatgcggtacaatcggggcaaaacgcggcacgaaccggccccgccacattaagccgctgccttacagccgcttccccgtttacaaagatacgaaataaagcggttattcaaaaatcagtttcacttcaccttcgaaattcggagtgaacacccctttgccgaggttatccagcacctcggcccggctccagaaccgcccgccgtccagttcgtcgctcggcgccaccggcccgtcgtacaccgcacgatggacatagaccagttcgcgctcccgctccgagcggaatacgtagaccgctacccgttcgggcgtaaactcggtcacccccagctcctcgcgcacctcgcgccgcagagcttcatccaccgtctcgccgtaatcgacatggccgcccacggccgtatcccagcgtccgggctgaatgtctttccactccggccgcttttgcaggtaaagctcgccgcgggaattgaacagatgcaggtgcaccaccggatgcagcagcatcgacccgccgtggcattcgccgcgcgtagccgatcccacgacaacgccggagggatcgaccaccggaaaaagttccgaaccgttatcgcatctcatggcggggatatttacgtatataaatcacgacggtcagcaaaccgagcaggacgaatcccatgcccgcgagagccgtataacgataccccagcccgtggtcgatcggcaggccgccgcagtaggcgcccagcgcattgcccagattgaatgccacctgcaccaaagccgcccccagcatctcgccgccgcgcgaattctccagaataagcagctgctggggcgacgaaacacagaacagacatcccgtgcagagcaccatcagggcgacggagaggtaacggacgtgcgccccgaagtaaatcgcgaggagcgtcgccgcggccgtggccagcgtgaaacgcacgaccttctcaggcgtaaaacgatcggaaaaatggcctccgatgatattgcccgcgaacatgccgaacccggcgagcatgatgatcagcgtcaggtcgtccgccgtgaatcccgaagcgtgaatcatcagcgggctgacgtaactgtaccagcagaaaatgccgccgttgcccagcatcaccgacaacagcacgagccacggcgcgagactgcgcagaaaacggaactggcctttcagccccgtatcgggcagcggttccatgcgcggcacccacaaccgcaccagcagcagcgccacgacgccccacacggccacgattccgaacgtggcgcgccacgtcaggacgttgctgatataggttcccagcggcacgccgaacagattggcgacggtcatgccgacgatcatgatcgacacggcttccgtacgcttcccggcgtcggcgacccgctcggcgacgatcgaccccacaccgaagaatgcgccgtggggaagtcccgaaacgaaacgcaagcccagcagcgaccagtaatcgggagccagcgaagcgcagagattacccgccgcgatcatcgccgtaagcgccagcagtatctgtttcagcggacgtttccgggcgacgagcaccataagcggcgcgccgaagcagacgcccagcgcataggcggaaatgaggtgccccgcctccggaatcgagacgccgagactgcgggcgatatcgggcagaatgcccatcatcacgaactccgacattccgagcgcaagcgttccgaacgccaaggctatcagactctttttcatagaggaactacattaaccgtaaccggctgcaaaaataacacaaaaggtgaaaagttattcgcctttcacctttgcattctgttgtttttatggtcatcccggtcggcccggccaaacaatcgggtcaagcgggccggtcaaacgccccggctgaacgatcgggccaaacaatcgggcagaaccgcaaccaaccgaacgatccggcagaaccgaaccggctccgcgccgctattccgcgggcgcctccgtcttgcgcggctggcccacttcgtagccgagggagtgcatccactcgactgtcgcggcatcgacctgatcgttgcggtcggtccagcggcgctgttcgatcagacgcttcctgtgctcgtcgatgcgctgcatgatggggaaatcgggatgtttcatctccgaacgccgctcgcgctccgaaggacgtatccggcggtcgaagacctcggcctgcgaaggccgccgcgccccctcccacttgaatcccttgagacggatatcctgcgtcggcggaatcttgtccatcgggtagaaattatagaccggatcgccgcggtaggtgatctgcaccacctgcttgtcttcgataaagaacgatatttcgccgctttcgatgacgcccatcatcgtgatctcgacgggttcgccgtcctgcatgtaatagatggtctgggcattgccgttcacatcgttgcggtaaatctggttgttgaagaagtaagccgtcatggtcttgcccgccacctgattgtagtgcgtcgtatcgagctggctgaccatcatcggactgccgatgaactcggcccgcgtgagctgctggttctcggtgaaaatgtccatcacgtcggaggtgatctggttgttctcgttccacaacacgggatcgatgtagaggtggatcgtcgaatcggtactgatcgccgtcatcgaatcgcacacggtctggaaatccgagcggtagatcttcacgttccggaaccctttcagcagacggtatatgctgtcgcggggcgcagccagcgagtcgatcgaatcggccggaaccgccatcgccgccgtgtcggtcagcagcgaatcgaccagcaggttcagcagcgaatcctgctcggccatgttgagcacgatcagcgaatcaagttcgcgcagggccgtcgaatcgatctgaatcatccgtcctttgcgcgtcgcacgcgcctgacgggccttgagcttcgattccgccttcaggcggcgcgccgtgagccgggcttcctcgcgctccttctgctccagcagccgggccgtcattttctccttgcgccgggccgctatctcgtccagcttcttctttttctccttggcggcggccgccttttcctcggccttggctctcttcgccgcctctttcagcaacgccttgcgctgggcgacggtcagcgtatccgcagcattggccagcgaatcggcaggcgccgcgccgcccagagaatcggcgggagcgggtcggtccggcgcgtcgagaggcgacggcgcgacatgcggcgaatccgcgtctccgccggccgccaatgaatctggtacggaaccggcggttgccaacgaatcggcggcgtctacgccctgcggcctgcggccggaacggggacgccccagcgaatcggccggaacgtcggctcctccggcagcatgcgccagcgaatcggcccccggcagcgccagcgagtcggccgaacgggcgagcgaatcggcagctgcagcctccgcggcccggcgttcggcgttttcgttgatcgtaaacaggaacatcgaatcggcgcgcatgaaaagcgaatcgccctgcgagaggtcgtagctcacgatcgacgggcggcgcgtgagaaatgcgtttccaggctccttccagtattcgccgtaatcgccgaaggcgagcaccttgtgctcggtatcgtcgatctgaatgtcgcgccataaaattatatggtcttcggcccggtagaaatcgatgctgtcgctccacatctcctgcttgtcggtcagcacgtacccgttgctggtcaccttgtaaagcgagtcggctttgcggtaagcgccgcggtcggcatacagatagtcgccctccttgttccagatattggtgtgtttaaagaaaaaggcgttgtcggtagccatgttgtagaccaccgagtcgcccttcagttcgtattcgtcgttgcgcatttcgacccggtcgacgcagaccagctccttgctgttggcgtagtagtaaccgcgcaccgactccagccggctgtcacggttgacaagcacgccgcccccgccgaattcgccgacgttctccttcgtgttgaaaaggaactcgtaggtgtagagcgtggcgtcctcgtcgaccaccttgacgatatccgaaaatacgcgggcttcgttcacctcgccgttgtattcggcccggtcgccgtaaatataggtcgtattcttgttgatcaggacattgccgaagaattcgatgcgcatgtccgaatagcggacggcgctgtcacacgtaatgacggcgccgttgtgctgcgcggcgaagttgcccaccagaaagatcaccgaatcgcccggagccacgggacccatgttgtccgacttgaggtcgatgagtttcttctcggccggctgctccgcctcaggcgcctgcatcccgccgcgggcgaaaatcacactgccggcggccaatgcgacgaccgctatggaaaggagcctgcgcacggttttacttcacccaatgtttgttctcgaacgctccgtcgcggaattcgggatcgatatagacatacatggcgtcgatcttcttcgacaaccagtccttgaagaccttttcctgcttggcgttgagcgccatctcctccagccggaggtagtcctcgttgagcgacgccacgtgcgtcggaatgatctccaccagcttgacgaccttggccagctggttgcccatgatgtcctcggtcaggaaagcttccgacacctcgccgggcttcagccgcaccagcgcgttgtaatcgttgagcgcgttgaagtgggcgaaatcctcgcgcaggaacttcgtcacggtcagcttggcgtcgaaagcgctgaaacgctccagaatgtcgtggttcgagacgataccgccgttcatcttcgacgtcgcatcgtcggaatagagcagcgcggccttctcgaaggtgatcgaatccttgcggatcagattggcgatgctgtccagaaaatgcgtgccctccgtaagctcgtcgatcgtatagaccggacgcagcaggatatggcggaaatggtagagactcccccgcttgtcgagcatctgaatgatgtggaatccgaactgcgattcgacgacctccgaaatctgtccgggcttcatgttttcgagcgccgcggcgaacgaagagtcgagactggcgagcggcgcagggtccatctcgccgccgcgcatcatcgttccggggtcctgcgaatacatgcgggccagattctcgaacttggccttgcccgtgatgacgcgttcgcgcatgtccagcagacgctcgcgcgtacgctgcttggcctgcgtgatcgacttggggaaacgggtgatctgcgcatagacatactgctcggcgatggtcggcaggctgtccttgtcgatcgacttgtagaaacgctcgacctcgcccggaatgaccgcgaccttgctcacgacctcgttctgcatggagctggcgtaggactgctcctcgtagcgctgacgcatgttctcgcggatgttgaaaatggccatgtggtgcttggcttcgagccggggaatcgatccctcggcctcgatcatgttctgcacctgctcctcgacgtgcgaagcgatgtcgccggcattgatcttcaccgagtcgatctgcgcctgattgaagagcagtttctgggtcatcagcgcttcgagcgcctcgttcatcggatcgcggtcggaggtgtacccctccgcgcggcgctgcgccgtgagctggcgcgcgtgatccgccacctcggaatagagaatcgaggaagaacccacgacggcgaccaccttgtcgagcatcacctgctgtttctgggcgaaggcccccgcagcgagcacggcgagagccgccgccattataccttttttcaacattgcgttatactttatcgtttgtattttcaaaaatcttcgcctccccgttctccacggcgcggttgtacagctcctcctcgtggctgcggatgatctcgccctgccgctggttgaagaggatgcggcggatcgtactccgcaggcgttcgaggggaataggctcgccctcgcgccgcacggcgtcgatctggaaataatagtacgaatggctgtctcgcatcgcctgcacggcgttcgacgacagcaccgaatcgtaattctgcgacctgagggtcggcaggaaactcagaaactccggaaaatcgacccactgttcccggaaatcggtcaccgtgaagtcgtttttctcgcagatatcccggaaatcctgctgctgggcggcggatttggcccccatcagctccttcagcttccgggcctgacgatagccttcgccgaactgcacgatccgccccttgaccaatgtacggtccaaccggaaatcggccttgtgcgcattgtaataggccgtaatctcgtcgtcggtgaacgtcgtgtcgatgctccggtccacatacagctggttcagcttgcggatcagcagcgcctgacggtactcctcgaccatcttgtcgatatcgtcgcccgaagccgaaaacagcgtctcggcctccttgagcttgagctgcttgcgcacccaccggtccacgtataccttcatgaacgccgcgctgtcttcgcccgtgactcccttgggaaccaccgactccacatcgcgcagctgcagctgcttgccgccggcgcgcgccagcgtggtatcgctggcgaaatagcccggcatctcccggcagcccgccagaaaaaccgaagccgccacgactgctattttcgctcgcaaattcataatccggaggacaaagatacagtttttactcgtaactaacgcagccccggcccagattattacgccgccgcccgatttttatcctcggctttcaggcgccgcagcgcgaggagcatcatgtaacccgaaacggcgaagacagccagcgcaccgatataaatcagcacatagagcgtcctgctgccgaccaagtcgatcagcatggcgttgccgtgcccggtgaccagcgccagataggcgattccgttattgacggcatggagtatgatcgtagaccagagcgagtcggtccgcatgtagacgaatccgagcaccagaccgatggcgaaggcgttcaccgcgacggtcggatgcacgtgcacgatgccgaatacggccgatgaaaccagccatgcggccatcacgccgtattttgcgcgcgtcgattcgagcagcacgccgcggaaaatcacctcttcgaacagcggcgccatcaccacgaccgtaacgatcgcccacgcgccgcgtccgtaggcgttgggcacttcgggcagcaggctcagcagcggttcgagcaccaccgacgtggcgagcatgaaaaccacgccccagagcagcaggacgggattcagtccgcgggaggagaaatgcgcgatgattttcggaccccggcgccggctgcggtaaaagagaaatcccacgagcgtaagggtcatggcgacaaaataggatacggcgttgaaatgccctacgagcacctgttcggcggtgctcaccgtttcgtcggcgctcgccagcagcgcctgatcgggccacttgcaacccaccagcagcgccgttacggcgcccacgacctgcgccagcaggaaaatgccgaaaaagaccagataatcggccagtgcgggaaatttcccctgcagtttccagattttaccgacggcctcaggagccggcgccggctcctgcacgggagcctctgtttttttttctgtcatatagcgtgtaactatcaatccgttccgagttcaaagataagcaattttcggttacggttatggatttccatttaaaatcattaaatttgcccgattataaacccgatcgaaacatggcaaaggttatcgcattagcgaatcagaaaggcggcgtgggcaagaccacgacggccatcaacttggcggcctcgctggccctgctgggcaagaaggtgctgctgctcgacgccgatccgcaggccaacgccacctccggcttgggcttcgacatcaatctggagggcgtctacgaatgtatcgcaggactcaaaaagcccgaagaggtgctcctccaaagccccgacgtgaagaatctatgggtgctgccctcgtcgatcgatctggtggccgccgacaccgaactgccgaaaatggaggatgcgcaccacgtgatgaaacgcatcgtagactccgtccgcgaccgcttcgactacatcttcatcgactgctccccctcgctgggctatacgaccgtcaatatcctcacggccgccgacacggtgcttattcccgtgcagtgcgagtacctcgccctcgaagggctttcgaaactgctcaacaccatccgcaaggtcaaaagcggcctgaaccccgcactggacatcgagggcttcctgctgacgatgtatatgcgcaacaggctcaacaaccaagtcgtgaacgaggtgcgcgaacatttcggtcagctggcctacgacacaataattcagcgcaatatccgtttgggagaagccccctcgcacggaaagcccgtcatgctgtacgatgccggggccgtgggttcggagaactacctcaccttggcgcgggagttcctcaaacgcaaccgtaaacgaagcaaataacagaacgcagctatgaaacaaccgaagggattagggcgcggactcgacgccatattcggcaccgacgccgtagacgccaagctcaagccgatgagccagatgaccgaaatcgacattgcggaaatcattcccaaccccacgcagccgcgtacgcaattcgacgaagaggccctcgacgagctggccgactcgatccgccagctgggcatcatccagcccattacggtcaagaaatcgggcgacggcaaatatatcatcatcagcggcgaacgccgctggcgggcggcgcagcgcgccgacctgaagagccttccggcctatgtccgcgaggtggacgacgaaaacctgcacgccatggccctcgtggagaatatccagcggcaggacctcaacgcgatcgaaatcgcgctgggcatgcagcgtctgatcgaggagtgcaacctcacgcaggacgcgctctccgaaaaggtcggcaagaaacgttcgaccgtctcgaactacatgcgtctcttgaaactgcccgacgaggtgcagctggccctcaaggaggggctgatttcgatgggacacgccaaggccatcgccggcgccccgcaggagctgcagctccgcacgctgaagaagatcctcaagaagagcctttcggtccgtcaggccgaggagctggtgcgcacgctcaccgagcagcccgccgaagcggcacaaaacatggaggacgaagagtatcccgaaagctattcgcggctggtggaacagctcgaaaagttcttctcgcaggaaatcagcatcaaacgctcgaaaaacggcggcggacggatcgtcatcggcttcgacgacgacaaggacatcgaacaattcatcgaacggttctccggccgcctcaaataaaatatggtaagaatccggttcagacacctgctgccgatactcgcggcactcacgttgtggcttcccgcccaagcgcagctccaccgcggggcgcgcaccatcgtgcgcgggggcatgctcgtgcagcgggattcgctcgcctcgaaaaccgactcgctggccgacctctcgctggtccgcgaactggattcgctgatgacgggactcttcgcggccgactcggccgccgtcgcggagctgcgcaccgacgacataagcaaagccgactcgctctaccggctcaaaatggccggcataaagatcgaatcggacaccaccaagcataaacgcggctggctgatgagcgattcgatgtcgctctcgaaagtgtgctggatctcgaccgtactgcccggttacggacagatttacaacaaacaatactggaaactgcccgttctctacggcaccttgggcgcgggtctggccctctatctccacgaaaacaagacctacaagcccctcaagcgcgaatacgaagcctacacgaacaaaaacctctcgcgcacgcccgaactggacgcgctgcaaagcaggatgatccgcagcaacacccgccggcaggtctatctgggccttacggtggcctcgtacatctacttcatcggcgacgccgccgtgaactactcgaccaacgaggtatcggacgtcaagaaagccaccacgctggcctgcatcttccccggcgcgggacagatttacaacaaaagctattggaaagtccccttcgtcgtgggcggtttcgccgcgatgatctactgtatcgactggaacaaccgcggctaccagcgtttcaaaaaggcataccggctgctgagcgactacgaaaagaatccggacgcctaccccgacggcccgaccgacgaattccacggccgctactcggcggacttcatccgcaacctgcgcaacaactaccgccgcaaccgcgacctctgcatcatcatctcggccggactgtacgtccttcagatcgtggacgcccatgtggacgcccacctgaaagactacgacgtctccgacgacctgtcgatgaatctcgaaccgctggtcgattatacatacgttccctccgccggcggcaaccgtgcggtattcgggttcaacctgagtttcaaattctaaccgatgagaatcctcctgaccatagtgctgctgatggccgtcgctgcgcccgcatcgggcctcgaccgcaaaccccgcaagaaagagaagaaaaaagcccggaccgaagccgtcgccgaacccgcaccggcccccgctcctccggccgcaaagcccgcacacaccgagcgcaaaaccgaacctgccgcgccggcacccgcaccgctcccggataacgacatgacgctgggactgacggccgcgcaggccgattcgctggtcgccgtatggcgcgaaaggcagtgctgcgactcgttcagggagttcttcgacaactatattctggtggacagcacacagaccggcgctgttcccgactcggtctatacccggcgtctgcgcgacctcgcatcgcccatccagctcccctacaacagcatcgtccggggctacatcaaccgttacaccgactcccgctacggcacgatcagccggattctgggcatgtcgcagtactatttcccgctgatcgaggacgagctgctcaaagaggggcttcccatcgagctgcgggccctgccgatcatcgaatcggcgctctccgtcacggccgtatcgcccatgggcgccgtaggactgtggcagttcatgccctcgacgggcaaaagctacggacttgaggtcaattcgctggtcgacgaacgccgcgacccggtccgttcgacgcaggccgcctgccgttacctcaaagacctttacgccatctacaaagactggtcgctggccatcgccgcctacaactgcggtccgggcaacgtcaataaggcgctggcccgcgcaggcgagaagagccgcaccttctgggacatctacgactacctgccccgcgaaacgcgcggctacgtccccgccttcatcggtgcgtcgtatgcctacgcctaccaccgccagcacggcatcgaactcaccgaagccccgattccgctggccaccgacaccgtccgcatcgaccggatcatgcacctccagcagatcgcctcgacaatcgacgtgccgatcgaaaccctgcgccagctcaacccgcagtacaaactcgacatcatcccggccacgaccaaaccctatacgctggtgcttccgcagcgcagcctgacgcagtacgtcgccaacgagcctgctattctggccaaagactcgctgtacctcaaggaatacatcaacccggcgaacctcgacaaaaagcgtcaggaacgttccggaacagtctataccgtcaagaagggcgacacgctgggcgccatcgcccgccgctaccgggtgaccacggcgcagctcatgcgctggaacaacatcaagagcgcccacaaactccgcatcggacaacggctccgcatcgaaggaaggtaagatgatctgcgaccacgataccattgcagctccggccaccgccgcaggaggggcgctcgccgtcatccgcgtaagcggcggcaacgcgctgacgatctgcgaccgcattttccggggaagcgcgccgctggccgatgccgggggctatacggttcattacggccatatcatggccgacgggcgaacgctcgacgacgtgctggtcacggtattccgggcgccccgttcctatacgggcgaagacgccgccgaaatctcgtgccacggttcgcagtacatcgtcaccgaaacgctgcgcctgctgaccgccgccggcgcacgcatggcccaaccgggcgaattcaccatccgggcctatcttgcgggcaaactcgacctctcgcaggccgaagccgtggccgacatcatcgcctcgtcctcgcgggcgtcgcacgcgctcgccgccaaccagatgcgcgggggttattccgcagcgttcgacaccctgcgcgaaaaactgctgcacctcacctcgctgctggaactcgaactcgacttctcggaagaggaggtcgaattcgccgaccgcacccagctgcgtgacaccatgcggcagatcaaggagcggatcgacgccctgcgtagctcgttttcgctcggcaacgccatcaaggagggagtcgccgtagccatcgtcggagcgccaaacgtcggaaaaagcaccttgctcaaccgcctgctcaacgaagaacgggccatggtctcggacatcgccggcacgacgcgcgacatcatcgaagagcgcgccaacatcgacgggatcgttttccggttcctcgacacggccggcatccgcagcacgaacgacaccctcgaacaaatgggaatcgcccgcaccatgtcaagcatcgaacgggcgcagatcatcatccgcctgatcgacgcatcgcagcccgccgtacccgtatccggcggaagcccttcatccggacaaacgggccggaaatccgcccctgcggttccgagcgccgattcggccgccgacacccaaagcccggactttccgctccgtcccgaccaaacgctgctgacggtatacaacaaaatcgacaaaacacccggtctcgcacttcccgaaggcgccgtcggcatctcggcacgcaacggcgacggcatcgacgacctgcgccggatcctgcgcgacgcggtcgatacggaagcgctctaccacggcggcacggtcatctccaacagccgccattacgaagccctgacgtcggcgtccgaagccctgagcgccgccctcgacggtctgcgcgacaaccttccgaccgacctgctgagcgaagagatccgtcaggtcatccgccatctgagcggcgtcaccgggcaggacatcgtcccggaagaggtcctcaaaaccatattctcgaagttctgcatcggaaaataggtcgtcatttttccaattaaccaaaacgccatttcgccagcacatcatcggcatataaacagcaataacaaagctatttacagttttatctgccaaacaaaattttctcatctctttgctgtacggatgcaaataatttgttacttttgtgttgctattctgttactcggccaaaatgagtaacagaagtaacaaaaatcattcaacgcaaaaggatatggcggagatcaaagaaccgatccggatcaggcgcaagaagctgacgaacgggaacgtcagcctctacctcgacatctacctgaacggaaagcgggaatacgaatttctgaaactgtacctcattcccgaaaagacaaaagccgacagggaggcgaaccggcaaaccctccaactcgccaactcgatcaaggcacggcgcatcgtcgaggtgcagaacggcgagcatggcttcaagtcggcatacgcctccgacaccctcttcttcgactactaccgtgcgatgtgcgcccggcggctcggagcggagagtaccggaaattgggggaattggaaatcatgcctgaaacacctccaaaaatacgagccgaacgagcggatcaggttctcgcagatcacgcaggaatgggtgcagggatttcgggactatttagagaaagatgcgtgcgcgtggagctgcgacgagcgggatcgcatcaaggatcatccgctgtctcgcaattcacgggtcagctacttcaataaactgcgggcctgcctgaatcaagcatacgaggatcgcatcatacctatcaaccccatgaggggcgtcgagggtttcaaggccgaagagggaacacgcatgtacctgaccatcgaagaggtgcagcggctcgctcaaacagaatgcgaatatccggccatcaagcgggcgttcctgttctcctgcctgacgggactgcgccgctccgacgtgatccgtctgacatggggcgatgtgcatcagcagggagagttcactcggattatcttcaaacagaagaagaccagcggacaggaatatctcgacatcccgccgcaggccgccgaactcatgggcgagcgcggcaaggacgccgagcatatcttccccaacatccactctccgagttgcaccaacgaaacgatcaaaaggtgggtattgcgggccggaatccataaggatataaccttccattgcggccgccacacgttcgcggtgatgatgctcgacctcggaaccgatatttatacggtcagcaagctactcggacatcgggagctatcgaccacgcagatttacgcaaaggtgctcgacaagaacaagcaggcagcggtcgccaagatacccgacatattctaacgaagaaaggcatcggtttcgatgcctttttctattgctggaacatcatgccccgtccggtcaggagccatgtcgcggatatgccgcaatcccgaaccagcggaacgagccatccgacctcgaaatagccacgattgcggtctttacgctgcgtatagaaatgaggcggagctatcgaattatcccggcaatattcggcgatactctttatcagccgattctgtacggcaatgtcgaacgccgtgaaaaaccgctccataatagccaacgtattgtcgctgtaaacccgtctgcggctcatttcttcttccccttgattagcgtcttttcctccgatttaagccgtcgttcgactttcttcacatcttcgcccgcagggagctgttcggggacgataccccggctcaaaagcatattgcggacggcgacgttgttatcgacatgctccttttctatcgccatctgtccgtgcaaattcttctgctcggcatttacagaggtcatttcggcggcaaaatctttcgctttgataccgatcgtcggcagaaagtcggccagcggacgggaatcgggtgcaccgagtttgcgctttaccaatgctgtatcaagatggaacaaagccctatcccctttcgaccggataatcgcaaaaccccggctatcgacgccgcgctcatacaggacgcctgacagtcgtttttcggtttctgccagcttcgcgcgagcctgcacccgttcgtaatcgaggattctctgctgcaccaactccgctctacgggtctgcacagcgaaatagttttgtgcaaatgcgatctgcggcttgcggggatcgccgttctgcgcaatcaggtagcaggcatagcgggtcagcatataatcatcaatctcgcgctgcgcacctttggcaagttcgatcattttcccgacgcggggaaaatgatcctcgacatgctctcctgcgtttacacacgcatcccgcgccttttcgattacattgtagaatttttcccacttcgaatagccgagaagcccgcaaagttctcgcgcactccaacattcgatcccctcatactcattggcgatagattcgaactgctcgaacaactcctttatctcttctgttttcatatatccgacctctatttattattcttttctataatcccgatgagccgatccatctgctcgtcctttttttcgagcagggcgatgaatttctccgacagcgcattgatctgattcgaatcacccgataccgcgataccgtgatccgtcgctaccgtattcccgctaccctcatagaaataacaaacacttttgttggtaacacgggcaatatcctcgatcaacccacttttgacatcctcggatttcagggcactatgcagacgttgatccccattatgtccgagcatccgcgcaacatccgcaattgtgatgccctccgagcgaagtatgtcctttatcttctgtcctgtcatatatgtttgtatatcacaatgttattcttattcaaacgcaaatcccaatctatgccaaatatttttctttgcagaaaacaaagaaatatgttggttatccaaacaaaagtatttatctttgcccttgcaatacgggaagatattgacgcatcaataaaatccgtcgggtgcaaatatataaaaatagtacctaacaagtgaataattatcgacgaaatatgagcagaacagagaaaaaatcatttttcgacctctatgcggagcagaaaaagaagccgacgcccgcgcagaatttcatcgccgagatcgctgcgctcacgcatcgttccgagaatacggtcaagatgtggctctgcggtcggcaagtccccgacgagctgacgcagagtatcatagcccgtcgctacaacctgaatataaacggcctcttcccaaaatcggaggtgcaatccaatgaaatatgaaagctctgctgaattggcgatactacgttctgatggtcgtcggtatgatcgccgttatcgggacattctccgtccccatagacgaccaaccgctcggagcatggctgctcgccctgataatcccgaagatcatcggattcggggcttggtatctcatctttcggatgtgcgactattgggacgctcgcgggctgattcccgaaatgtcgaaaacgatgcaggaggaggacgacacatgggagtagaggaaagattggaacgtatcgagcggcttctacttctcggttcgaaagaggtgctcaatacctcggagatcgccctgttgctcggcatatccgaaagccgcgtgcggcatttgacgagtgcaaagaagattccgcactacaagcagggcaacaaaatctatttcaggaaaaaggagatcgaagcatggcagcttcaatcccgcgtcccgaccgacgatgaaatccgcagcaggggcacgacctacgccgtaacgcataaatagcagagatatgaacgacaaccctaatattcaggaatccgaaagccaatgcaagcgcatactcgcctacttgctgaacggcagccggatcacgagcctcgaagcattgcggctcttcgggtgcatgaggctcgcatcgcgcatcagcgacctgcggaaaagccatcccgaaatcaaattcaaagcgacgagggttgagacgacgacggggaaaagggtcgctcaatattacatcgagagtattcagtaaacattcaattcaacgcaaatgaaaacggtaatcattaaagaaatcaggctcctcaatttcaagggactgcgtaatctgacggtcgagttcgaccccgcgctcacggagatttacgggcgcaacggcatcggcaaaacttcgatcttcgacgggttcacatggctcctgttcggcaagaacagcgaggacagaaaacagttcggcatcaagacctacgacgaggccggaaacatcatcccgaaactcccgcacgaggtatcggccgtcctgctggtcgatggcgaggtcgtaaccctctgccgtcggttcaatgaaaaatggacgaagaaacgcggctcggcggtcgaggagttcgtcggacatgaagaggaacgcctctacaacaacgtaccctgctcggtcaaggagtggaacgagaagatcgccgccatctgtcccgaacaggtattcaagttcatcaccaatcccctctacttcacatcgcagtcggtagatacgcagcggtcgatgctcttccgtatggccggaggtatcaccgacgaggagatagccgccggaaatgccgattttgcggccctccttgcctcgctcacgggtaagacgatggaggaatacaagaaagagatcgccgcgaaaaaacgccgtctgaaaaccgaaatcgaggccatccccgaacgtatcgacgaacgccgccgcgatgtgccggaggcggaggattgggcggccctcgaagaagaactccgccaaaaacaagaggcactcgcaaaggtcgaggaacagattaacgacgcatcgaaagcctatgccgccgcgaatgaggaacggcttgcaacggtgcgcaaaatcagcgacctgaaaaacgaacggctggccctcgaactcaaaatcaaggacgaagtacaggccctctaccgttccgacaaggccaagcagcgggccgctgccgaggatttggagcgggcgaagcgcgacaaagccgccgccgagcgcgacctcgccaatgcccgccgagaggtagaggtatgcaccgatcgccgcgccgagcttatcaagcaatggcaatcaatcaatgcccgcaagctcgtattcgatgagaacgagtttatttgcccgacctgcaagcgccgtttcgagatcgaggagatcgagagccgccagcaggagattaccgagaacttcaatcgccggaatgccgccgacctcgaagagaacaatcgtcgcggcaaggagaacaaactccgcatggaggaggtgaatcaatatatcagcgaaatcgaggaaaagatcgccgagcaggtatctatcatctccgaaatcgaaatgagcggcatcctcacggcaaaactcatcgaacccgacgccaccccgaccatcgcggccaacaccgagtatatagcactcggagaacagatcgcagaactcgaaaaggaagtttcgcagcccatagccgccacagaggatgattttttacgcgagggacgcgattctcttaccgtcggaatcgacgcgctcaaatcgcggctgatgaagcgcgaacagatcgagaagaataaccagcgcatcgccgaactcgaaaagtctctccggatgcagtcggaagaactcgcgcagttggagggtatcgagttcacgatggcagctttctcgaaagcccgcacggaggccatcgaaagcaagatcaacgggctgttcgacttcgtgaagttccgcctcttcgagacacagatcaacggaggtgaagtggaaacgtgcgaagcaatggtgaacggcgtgccgttctccgatgccaataccgcagggcaattcaacgcgggtatcgacatcatcaacgcgatatgccgtttcgagggcatttccgccccgattttcgccgatggttcggaaagcgtcaataccctgcatccgacacaatcgcaggttatccgcctgttcgtatcgctcgacgacaagctcgtcatcaagcacaacggaaatccggctcaaccgaagagccttttcgactaataatcattcacttaaaattcaacgcaattatgaaaaccgaagaacagaaaagcgcatttatcctccgcgtggaggagatggtaaaagagatcgaaacgctgatgcaggagggggggggcaatgagaggtcttgcatcctcctcgtaaacgagaagccgcaagacagcgacatgacggcccaatgtatagcgatcatgggaagcggcaaaaggctaatcgaaagcatggccgcattcatcgaacggcccaacatggcagaagtcgtgtctctcagtgcaaaactcgccgctcttaaaaaactcgcagaaaattaacattcaaaatcaaccttacaatgaatcaagcaatcgcaaagcaggatcgccccgtcgatctgctcaaagcaacaatcaatgctccgtcaatacaggagcagttcaagaacgccctcggcgagcacaaggatacgttcgtcgcatcgctcatcgacctctatacgggcgacaaatccttgcagacctgcaagccctcggcaatcatcatcgaagcactccgcgcggcaaccctccgcctacctctgaacaaggccctcggtttcgcctacatcgtggtttacaacaactcggtaaaagtaaccaacgagcagaccggacgcgaggaatggatcaaagttccgacgccgacgttcatccccggctacaagggctatatccagctcgccatgcgaacggggcagtaccggacgatcaatgccgatgtagtctatgagggcgaagtcctcaaggtgaacaagctcacgggagagatcgctttcgacggcgaaaagacctccgacaagatcatcggctacttctgctatttcgagctgctcaacggcttttccaagacgctctatgtaaccgtcgaggatatggccgcctacgccaagcggtattctccctccgtgaagaaagaaacgaccgtcgcgcagctcatcgccaaagccaacgacggcatcatcggcaagaaagtcggatgggagggcaacttcaacgacatggctctgaaaacggtgattcgccgcctgctgtcgaaatacggctatctctccgtcgagatgcagaacgcgatggctcacgatgtcgaggatgaggccatgtcgaaccgcaacgacacgctcgataatgccgcagcgcagacggtcgatctctcggcaacggaatacgaggaggtcgatacggaaacgggggaagtcaaggaaaccggatcggagcaggccgcacccgctcctgcacctgaatactgatctgacggcacgagagtatgatcttgaaatgtttggggagttcatcacggggcaactgctacatcctcgaagcggccgatgaaactttgatcgtcgaggcgggaataccgatgcgcgacatcaaaaagggtctcggctggcagctcggcaaggtggtaggatgcctcgtatctcaccgacacgaagatcatgcaaggtcgttgaacgactttctcacctgcggcatccgcgtactggctctcgccgatgtattcgacgccgccaatccgagaaatcgcgtattctgcaagataatcgaaccgatgcacggctacaaagtgggaggcttcaaggtcttcgtactgccggtcgtccacgatgtgccgtgcgtcgggttcgtcatcgagcatcaggagatgggacgcctgcttttcatcaccgatacgatgatgctggaataccggctgccgaacctgaatcacatcatgatcgaggcgaactactccgatgcaatcttgcagcgcaatatcgacagtgggcggatgcctcccgccatgcggggacggctgctgggttcgcacatggaattgcagacgacgaaagagattttgcggacgaccgacctatcggcggcaaatgaggtgattttactgcatctctccgacggcaacagcaatgccaaaggattcgccgaagaagttcggcaaatcgccggaaaaccggcatatatcgcccgtgcaggattggaggtcaatctcgataaaatgccctactgatatgcgacccgtgccgaacgatatagtttcaacgctgatccgctacctgccgcagatactcgaaaacgtgcagatagacagcggaaatacgcggctcatcaatgccgtaagactgacaaaaaggattattccacgattaaagaaaattgagaatgaaaaaaataccaaaccctaacggaaacaaattcgtcttgccaaagggatatactgacctcggatggcaactcgattttaatgcttccgaactaaaaaaatgtagggaagccgggcatatccggcggaagttcgataattccaaatacctgtatcggtgtaacgatgtggtatatatctgcgatcaatgcaagaatgtacaccatgtcgatatgagtgattaaaaaatcgaatgcaatgctgatagtaaagcaggacaagacccgcaaggaggaagagggacagatattcgtcgaactcacgatttaccgtgatgtcaggaatatcgcagactgcaaccgcctcggatattggtgcgacaaagcgcatctgtcgcacttcatcatggaatgcgcgaaatgttttacgcaagacgaattaaaaaacatactgaaaatgaacggaaacaatatttacatcgagaaaaacaacctgctcgatgcctacaagaaaggcaatgccgataacaagaagatgctcgaaaatctcttcggcaaggagatgttccgcccgaaaaacatcatggagcgcatcaagacctttgatgacgcattcaaggaactcggcgagcaccatccgctcgtaaaagaataccacaaacggcatctgttcctcgaagacgattcggatattagctccgatctcgtagcctacctcaaactccgcatcattaccgccgctctcaacgagggttggacaccgcagttcaccgaggacgaataccgctacttcccgtggttttggctctacaccaaggaggagatcgccaagatggacaaggaggagcgcaagaaagttgtcctgttcggcggtgctgcgcattacggctcgtctgccggttttgcgtatgcgaattcgtctaacgcgccctcggatacggttgcgtttatctggtctcgcctttgctttatccccgcataacgccacagaaaacacgctcggccaataattaaacgctacgacaatggagaataaccacaatccgatggaggatgacggctcgctggatttcctgaaaatccccgccgatgaaaccaacaagcatttcaactgccccgaaacgacgcagcagaagttgataaacctcaccttttgggtctgcgactacatcgagggagtgaaaacgaagttcggagagaatcggacgctcgtcaagatcaagatgaatcgggacgatcacgaccgcgatgcacgcaagttcttcaccaattcgcgggaaatcaaatatgtcctcgccaagattcgggaaatggacaaattcccgcgacgggtaacgatgcgggcatcgggaacacggtactatttggagtaatggatgtataaaggttggttgctcttgcggtgtcctgttcagcggtaatgcgaataacagctcgaatgccggttttgcgtatgcgaattcgaataacacgccctcgaatacgaatgcgaatatcaggtctcgccaatgattttcagaaaggtaaaaacataaattttgagagcaacgaccctgcctctcggcaaaaaatatcacctcaaaaaggagttagtaggcggtttcgggcatcccgaactgccgaacgccccgaatatgaaaagcaaagcgtcgaaatgaagcgtataggaaacttatacgaaaagatcatatcgctggataacctccgcctcgccgatgaaaaggcaaggcgcgggaaactccgctcgtatggcgtcttgcttcacgacaaaaaccgtgaagcgaatatccttgccctgcatgaaacgctgaaaaatcatacattcaagaactccgaatacagcacgttcacgatctatgagccgaaagagaggatcatatttcgattgccgtattaccccgaccgcattctgcaccatgcaatcatgaatatcctcgaaccgatatgggtttcggtcttcacaaaagacacatatagctgcatcaagggccgcgggattcacggagcgatgcggaatgtcaagcgggccatcaaagaccgggaaaacgcccgatattgcctcaaaatcgacatccggaagttctacccgtcgatagaccacgacgtattgaaaaccatcatccgccgcaaaatcaaatgcaaggatacgctcgccctgctcgatacgatcatcgacagcaccgacggcgtgcctatcggcaactatttgagccaatacttcgcaaacctgatgctcgcctacttcgatcattggatcaaggaggagaagcgggtgcggaactatttcagatatgccgacgacatggtatttctcgcctccacgaaagaggagctgcacatcctgctggccgacatcaagaagtatctcgcggccttgaaattgacactgaaaggcaatgagcagatatttccgattgccgagaaccgggcggacaagcacgggcgcggcctcgatttcgtcggattcgtattctaccacaaccaaacgctcatgcgcaaatccatcaagcagaatttctgccgcatggccgcgcgtctgaataagaaactcaatatcagcgcgagagactacaaacagaagctatgcagttggtacggatgggcgaaagtctccaattcaaaacatttgttaaaaaccatcattaaatcgcaattctatgacacgttcgtattacgatgcaaggccgtctaaattcgaggccgtaggcaacggaagctacatctaccgttgggatattcaggaagaggccgcaccgcagcagatcatggcagagggcgaagatcagcccgccgccgaaagttcgcgcacgcagtattcctgctatgaggtaatcgtatgggcttccgtatcgagcaacaagatcacggaggccgtcatccgtgcaatgtgggatgccaactacgagcagaagctcatcaacgagtacaacgccgccaatctcggcgtatatggcggctccaagtcgagcgacgaggcaaaggcgaagatcgcctcgtacaaggactttctcgcagcgagagccgcgttgaaagcccaaatcgacgcagactgcgccgagctgaacatcgaataaaatcagatcatgctgaccctgcatttcaacaacacgacattggacgtacaggagagcgatagcagctaccgctatcgctccctcatgtccaagccgcaactcgtcctgaaattctccctatcggaatttgtcgaaattcccgtcggggcatggtgcgagtatcaaggcgtgaaatacaaactcggatcgccggaaaacatcaagaagaacggaacccgcaatatcgaatacactcttaccctcggaacattggaggacaacatgagcctgtataagatgcgtaatcccgtcgataaacgcctcaaatggtcgatgtgcgccaagccccacgaactcgtcgaagctatcgtttggaatctcaaccagcgcgacggagccggagtttggaaagtcggcgaatgcctcgatgcggcggagcagacggtcgagttcaaccacacctacgtcgatgctgcattgcaggatgtcgcaaacaaattcgagaccgagtgggaaatcaacgactatacgatttcattgcataaagtcgagtatttcaaggatgatcccctgccgctcgcatacggcaagggtaacggcttcgagccgggtgtcgggcgcaccacgcagagcgatgaattgccgatcaaacggctctatgttcagggcggagatcgtaatatcgaccgctcaaaatacggctcagcggaattgttgttgccgaagtcgcagacgctcgtttatgagggccgcatctatcaatccgacgcagagggatattccatcgagcgcatcgacaaagtttccgatgcagtcaaggaggacagcctcgattgctccgagatatacccctcgcgcgtgggaacagtatcggcggtcgagtgcatcgacgcaggaaagaatttctacgacatcatcgacaattccatccccgcagagctgaatttcaacgattatgtcatcgagggcgagacggcgacgatcatcttccaaaaggggatgctcgcgggcgacgacaagcagttcgagttcaaatacaatcactcggaacgccgctttgaactcgtgccgcaggaaatcgacggggttacgatgccgaacgaaacattcagtcccgccgtcggcgacacctacgccattttcggtatcatgctgccggattcctatatctgtaacaatacggataagactggggcatcatgggatatgttccgcgaagcggcccgcaaactctatgagaacgaagatcagaaattcacctttaccggcactctgcaagggctgtgggcgaaaaagaattggctccgtgtcggcgggcggctgaaagtcggcggatatgttctgttcaccgatgagcagttcgcccccgacggcattccgatccgcatcacgggtatcaaggaatttctcacctcgccgtatgctcccgtcctcgaaatctcgaactcggtttcaggcaagagcgtatcgtcgcaacttcgggagatcggccaaaacgaggtggcgacagataacagcatccgcaacgccgtaagctataccaagcgtcggttccgcgatgtcaaggaaacgatggcgatgttggaagattcgatgctcgacaacttcacgaactctatcaatccgctgaccgtgcagacgatgatgatgctcgtcggggatgagagcctgcaattccggttcgtcgccagcaagaccgacctcacagcggtaggcgacggtatcacctacgacaacacggcgaagcagttgcatatcccgcacggattcatccagcacatgacgctcggcatcggcacgatctcgtcctctcatgccgattcggagtacaaggtttgggagatgaacgaatacctttcgccgtacctcgacaacggagcaaagaaatattatctctatgccaaagtcagccgcacggacaccaccgtaaagggcgattttctcctatctgacagggcgatcaagatgaccgatgtcgcagggtattatcatctgctggtcggcattctgaacagcgaatacgacggcgaacgaagctatgtttcgctctacgggttctcggagattctgcccggtcggattacgacggataagatcgtatcgtccgacggcaaaacatatttcgacctgctgctgggagaaatcggaggcaatatcaaattcatcgcctcggatggaagcctgaaagatgttgccgacctcgaacggacagatttggattatctcaaagaggctttcaaagatgcaacgaccgaaatagacggaggtgttgccctttcgggattcgtgggagtgagagacgcattgaaaaacgtaatagcggctctttgcggttataatccgacctccgaggatgactacccgttgatattcgcaggagcacagcaagggaatgtagagtattacggatggacaagcaatagctatacccatatctacacccaaagcgcgacgccgagcaatggggataattgtttcgacaataaaggctctgtcgtaggaactgtaacgaatatcgtaggggcgcaaattttcgcattatccacaacgggcgaaacctatcaacgcaataccggaatcgactttaccgcgaaaacgccctctgcaatggagggcaaccgagccaagttccgagtatataaggacggacgatgcgtttccaattactttgaaacgagcgggtcatacaagacgatatacgtgccgacatattgtccgccattggtctttacaaccgttttggaggtttcggaaaattgctacatggacttgacctccggagcgcaattcggtgttttgatggagacgaatgacgactatgacggctataactgctcgctgtataattccagcagatacccttgcacggtggttaaagggacgaaaagctcctatacgcaagtcggggcattgtcccccggcgaaatgatggattttgtcaatatcaaaggaggatgggtattaaagaatttcaccagatattcaacgaaagagtaaaattattttcgcccatatagtacctattaggtattattcactacttttgtcataaatctaaacctattatggaacagaaaatcgaaaagggaatcgggtggctcgaaaagctgctcaaaatggaggaaaaatacgggttcttccgctttctgcgagtgcttttgcttttactcctcacggggtttgtcatccttactatcaccaatccgcactatgtgctggataaagtcgaatcaatccaagcagagcaacatgatgaatcggtagccaagcgcattcaggtagatgcggatattcgtctgatgctgcgcaaactcttatatgcgctcgatgccgaccgtacatggctcatagagctgcataatgggagcaaaaacctatcatcaggattaccgttcctatacggcgatatgcgaatcgaagaggtcgctgacggcatcaataacgtcgatgatgaatatactgattttcagctatcgaaatacccttttatcgggaaagtctttgacgacggattttattggggagctatcgaaacgatcaaggagatcgacgaacgaatgtatttcaagttcaagtcgaataacgtgaacgaggtcgccattctcgccctatatgcaggagaaaagccgctcggagcaatcggcatatcattttgcggacaaaaacagatggacgcctccgctgtcggcaaggctattcgcaagtgcggtattcaggtagcaaccctattatccaactaacatcacaacatcatggaaactatcaaaaatattctgaccgccatcttgaaatggctggggagtattccatccgacaaactcctgcacctcattgcaggtgcggtaatcgcagcctttttcgcccttgtcattccctatacggctgaaatatgcgtcttattcgccgccatcgcaggggtggcaaaagaggctttcgaccaataccgctacaaaggatgggattggcttgacttggcctatacaatggccggaggtttcatcattcaaattttcgcgtggctatgaaactacttttgaaacgcatcgcattgaagccgacctataccatcggctggctctacatcgacgggcaaaaggtctgcgacaccatcgaagatgccgtgcgagacctgaacaaaaacgggcggttcgacaatggcgaaaagaaagtgtatgccgcaaccgctatcccctacgggacatacgacatcacgctgaaagtccaatccccgaagtataaggatcgggcgcagtacaaattctgcgacggctacctgcctcggctgctcaatgtgccggagttcgacggcatcctgatccatatcggcaataccgccgaggatagcgcggggtgcatattggtcggcgaaaacaaggaggtcggcaaggtgctgaactcgacggcgacattccgacgggtctatgacatgctcaaaacggcctccgaccggggcgaaccaatccaaatcgaaatcgtatgagaacgctgattttgtgccttatcatcggtttgctgtcggcctgctgcccgtgcaaacatctgacgacctcgaccgggacgcgggacagcctgcatgtcgagatcaggcatcgcacaatatggattcccgacacggtacgggtgcaactgccggccgagcgaaccgagcagaccgtccgccaagattcgagccacctcgaaacctcggcagcggtatcggacgcaaggatcaaccccgacgggtcgctatcccactcgctcgaaaacaagacggacgatcgggaaataccgacgcagcggccgatagaatatcgggacagcatcgtttatcgggatcgggaggtcgaggttgaaaagatcgtcgaggtagagcgcaaattgacatggtggcaacagacgcaaatacgcggtttttgggtgacaattatcatcattctcgtactgctccgtaaaaagatttttcccttgattcggaggtttatttgagggcgcaaaggcgaacaatacagccgattataataatagctccaaatttcagaaactttttgtacctttgaaaaagttttgatattatagcgtttgctattgtttttaaggtttaggaaatcgccaatttcacaacggacttaaaaaacaatggtaaatgcctgcgttatgcgtgggcatttccttgttagtccgtaggtgtttggcgatacctctaaaccgacaggaacgcccacgcttttctgtgtgcatatccggaaacagcagcgaatgtttgatttacggatagcatgagcgaaaagaaaccaacaaggcaggcggagatcgtatttgccgccatgaaagcaatcgaggccaacggcggcgaaatgaggatttcggatatatacgaaaccctcgcatcatcgttcccgctgaccgattatgagaaagaggaaaccaagagcggtgtcatccgctggaaagcgtatctcaacttctattcgatagaggtaggcaaggtcgggtatctcgtcaaaaagagcgggatttggcatctgacggaagagggtgcgaaagctcttgccgccggagccggagagttcttcgccgattttcacggcaagttttccaagatacagaaagagcacgcggtatcggtcatcgaggagaatgcggatcagcccgatgatttggatatgttgcaaggtcaggcatcgaaaggcattcgggagtatatcatcaaaaagaacccctacgagtttcaggatttggtcgccgccctgttgcgggcaatgggttactacacgccgttcatcgccccgaaaggcaaggatggcggcgtcgatattatcgcctaccgagacccgctcggcacgaccgccccgcagttgaaagtacaggtcaagcattatccgacctctgcaatctccgtcgatgtcgtccgcagtctgctgggggttctcgtgaaagagggtgaggtcggcctgctggttacatcggggacattcaccagcgaatccaagaaagaggcccgcaacgggcatcgttgcctgcgtctgatcgacatcgacgagttcatcgacctatggattcgctattacgaccgcatgagcgaggaggacaaagccctgctcccgattattcccgtttattttctgaaagcataaaaccatcatacttatgaaaaaactcttatctattctattcctatccctttgcatcgcagcttgctccaaagacgataccccaaagccggagatgaacgaaaccgtcaaacagatttggcagactttgaacggcagatatatcgggttccatgaggataagttatcatccgccggttcctatacggaaaccatcgtctttcagccctattccgagccggaagagatcaagccgacggtaatccttttcccggattttacagcatacggaaccgccgtcataaccgacacccgatttgaagagatcagcggctcatcgacctgctattactcaatcgacgtaaaatatgagggagcaatcccgacgatctcattctttgaatacggaacggacggcgaagtagtaaacagcgaagatcagcgcaacatcaaggtcatcgacgcctcctctttcaaaatgtgggattatggcttgaccgaggccgagaatgcgataatctacaccaagcaatagaaatccaaataattcaatatctttgcggtactgatagccccgtatcagttgcgttgaatacccctctcgacagaccgatagatcgggcgttgagagggtttttcattcgattctgttacccgtctgttacccggcctccgaagtggcgtttattggttacaaataagccaatatatcatagtgagttacaacctattttagaaagaagtaatagattttgcatcggcaagtgatggcttgtaaacagccgtaaccaactataattatttagaataaagtcgctgtatatcagcgacttttctattttaacactttccagtccgtatttggaagtaacggtttttatccatatttttctatcatatttctaccgcgacagaaattcacggttagcccgaatgtcacagtgacgcattagttgacgtgtgttgacagtggtttacatgtgttgacaaaaatcgggagaaataaggcgaaattaccaccaatgtaaacaaggaaaatatggaagtaagaaagatttgccaatggtgtggaaaaccattcatcgctcaaaagacaacgacttgttattgtagccaccaatgttccaatcttggctacaaggaacgcattcgggaacgtaagcgacagttgaaacggtcgcaagaattattgcaacctcggcaagccgccgagggacaggatttcttctcttttgcccaagcagcaaagttaatgggcgtaaccagacagtacatatataaattggtaaaggaatccaaacttcgtgcttcacgcatcagtggtaagaagtcgctcatccgccgtgctgacattgaactgatgatgaaaaccaaaccttacgagcgtgtcgtgcccaaagaggacttcaacatctccgagtattacacagccgaagagattgcagacaaatacaaagtcaacgctaaatgggtgtggacttacacacggcaacataaagtgccgaaagtgagaatacgccagttcaactattacagcaagaaacatatcgatgccgcctttgccaaatacgaggtagattccgaccttaccgaatggtacacaccagaagaaattcaggagaagtacggcatgacacgtgtcgccatccgttcacaagtgtataggaacaacattccctccaagaaggagcatgggcagatattctactccaagctccacttcgacctctcaaagagttccgaacaggagagcaaggcggaatactacaccgtcaaggaggcgatggagaaattcaaactctctcgtgattcggtttacggtattttgcaattccaccagatcaaccgggagaagaatggaaggttcgttcggtttctgaaagtggaatttgaccgggtaatgggtgtccgcaaatagtctaatttatggctatccgtaaattattcaaaaattaatccctgctgtaggtaatctgcatgattacattatagagtttcgccgacgaattaataataaccataaaaatataacattatgcatgaatgcaagaccgtgacattaaggacacgtccgctaaaaggcaggatgatgtctttctatctggattattatccggggtatcgagacaaagagacaatgaaagttatccgtcatgaatcgcttggtatttatatctatgccaatccgagaaacaaacgtgaacagaatttcaacgaggtaatgaccgagaaagccgaagccatccgttgccgcaggttcgagtcggtagtcaatgaacggtatgacttctttgacaagtacaaactcaaggcagactttctggagtattatcgcaagcagctccgtaagcatgaccagaaatgggagtttgtctatctgcatttcagtaacttcgtacatggtaaatgcacctttgaagagattgacatcgacctctgtaacaagtttcgggaatatctgctgagtgccaagaagctaaggcgtaacggacgtatcacacggaactccgcatcaggatactggtctactttcagaggtttcctgaaaatactctatcgtaatgggatgataaagaccaatgtcaatgatttcttggaaaagatagagacagaagatgtaatgaaagaggccctgtcagttgaggaattgtacaaattggctgagacaccttgcaagaaacctattctgaaaacggcatcgctgttttcctgtatgaccagcttgcgcatcagtgacattctctcgctatgttgggaagacatcgtggactattctgccggtgggaaatgcgtacacatcattacgcaaaagaacaaggcggaagacatcattcccatcagtgaagaagctttgggattgattggctataattctgaaaagaaaggtttggtattcaaggggcttatgcgcagttggacgcaaataccgatgaaagaatggattcgttctgccggaattaccaagaacataacatttcactcgtatcgtagaacatttgcgacgctacaagcagctgccgggacggacatccgcaccatacagagcatcatggcacacaagagtatcaccaccactcaaaggtatatcaaagtcgtggatgccaacaaacgtgaagccagcaagaaaatcaccctgacacggcaagactgacagctgctttgtcctcgatttctgcagtcagagtatgatttttcacccaaaatcatactctaaccgttattttttacaaatattgagcgattcgtcatcactaattatatatatatctggaatatagcacataactttgccatataaccatttcaaatacttgcagcagatgacaaataatactcaaattcggaccaagaggataagttttattcttgcattattggtaattgcctatgtggcagtagacacttacctattcacttatcaccaaatcaataccacaacaataacaactccagttataataggccttgtggttacaaagttactacaaaaaagtggaatacggaagaatgaagtaatagaattgatttacagaggtttcatttaagctgccgattctctccaacgccaccacaatccttgcaaaagccaaatcaagacgtcgctacgttacttgttcgtaaccacaccatataagtgacgaaatgggtaagaatggtaaaacaagacattgtgatatagtgagttactgacaactcacgcaataaatccggttacggaaaaagattgcgccgttcctccgtgttttgcgtaccgacgaaggattcttcaccgactaattttgaacctaaaaaaattaaggacgatgaagagtacattttcagttatctactacctcaaacgtcaggtagtgaaaaaggacgggacagtacccgtcatgggacgtatcacggtggacggaagccaaacacagttcagctgcaaactgaccgtcgatcccaagctgtgggacaccaaaggaggacgtgtcacgggcagaagcacggctgcactcgaaacgaaccgtatgctcgacaagatgcgcgtacgcatcaacaagcactatcaggaaatcatggagcgtgacaacttcgtcactgcggaaaaggtgaaaaacgcctttctcggactggaacaccgctaccacacgctgttgcaggtgttccggcaacacaacgaggactatgccaagcaggtggaggcaggcatgaaagccaaaggcacgtttaacaagtacaagatcgtttacaagcacctgcaagagtttctcaccatccgctaccatgtgaaggacattgccctgaaagagcttacacccgctttcatttccgattttgaaatgttcctgcgcacggacaaacactgctgcaccaataccgtgtggctgtatgtctgcccgcttcggacgatggtgttcatcgccatcaacaatgagtggctcacgcgcgacccgttccgtgagtatgaaatcaagaaggaggaaacgacccgcagctttctgacgaaagatgaaatccgcctgctgatggaaggcaagctgaagaatgcgaagcaagaactgtatcgtgatttatacctattctgcgccttcacgggcttgtcgttcgccgatatgcgcaacctgacggaagagaatatccgcacctactttgatgaacacgagtggataaacatcaaccgccagaagacgggtgtggtgtccaacatccgtatgctcgacatagcgaagcgcatcatcgacaaataccgtgggctgtgcggggacggcaggatattccccgtaccccactataacacgtgccttgccggaatccggaccgtcgccaagcgttgcggtatcaccaagcatattacatggcatcaaagccgccatacggccgccacgacggtgttcctctccaacggcgtacctatcgaaacggtcagttccatgctgggacacaagagcataaagacaacgcagatatacgcgaaaataaccaaagagaagctcaatcaagacatggagaaccttgccgcgagattgaaccaaatcgaggaatttgcaggttgtaccatctaaaacagagaagccatgaaacgtgacataatcatcattgaggacaaggcggtcagcgtaaccggtaacgatgtatggatgaccgccggagaaatcgccggactgttccacacaggtgtcccggcagtgaacgccgccattaaagccatcctcaaagcggacgtgttgagtgactacgaggtatgccgctacattcaacttgaaaacggtctgtatgcggatgtttactcgcttgagatcatcatccccgtcgctttcagattgaacacctactgcacgcacgtgttccgcacgtggctggtgtgtaaagctctctcgaaagaaaagcgacaggcatacgtgatgttcatacagaacgggaaagccgggtattgctgaacacgcatacgtgccaacaaaaaggaaacggacagcctaatttgagttgtccgtttcctttttgttcgttttcatgcttcctttattctattggcttgcggtaattcgcctccagcagttcacgcaatcccgattcggggtaaagcacttttcctcctaaaaggatgaagggcaacaccctgttgttgcggtattcctgcaaggtacggcggctcacacggagcaactccgccacctccctgtccgtcaggtaacgttccccgtccagcggcggacggtagttttccaaaaatgcggagagccatttagagcctttgcgcatattctgcaccacggtggcaagcggctcgtcctccagtgtaaaaacattgttgttctcgttcatcatgactttggattcagtgggtgaataacaagattatctgccgccgggatagagcgtaccgataagcggaatcagcctcttgacttcttcctgcttgtaatagaacctgcggtttatctgcgagtagccgataagccgtttgtcgcgtaacgtctgcaacgtgcgcgggctgattctcaactgcccgcagacttcctcgcccgtgagccatctttccagccgccctccgtcgttcttgcgcttcagggcggcaaccttctccgagagggcattgaaggacgccaacatcatctcgaaggtctttttctcgatagatacaatttccatattcaaaacatttctggtttgccgcaaaggtaacgccatcctcatgaacgcatatcgtttcccactgaaaggctgtatgttgcgccatctgtccgggttacggagccatttccgataaaaatcttacgtgagacacgtagtgagctgttaaagccccttttgtttattgccgaattttgccgcagaaaccaaaagaaaggactgaatatgaaagtaataacgatggaaagttccgtcttcaccgcattgacggaacagatagccgagatagcggcacacgtgcgtgccgtttccggcgaaagaaaggaaaaatccgcagacaggttgctcaccacccgtgaggcggcgcacctgctgaatgtgagtacccgcaccctccagcgtatgcgcagcgagcatcgcatcggctatgtggtgctgcgcggcaagtgccgctaccgccagtctgaaatcgaccgcctgcttgcggactgcaccgtcatggaagacgcggcgacaccgacggaaatgaaacgcaaccatacgctgcgcacgggaggcggcaaacccaaaggaaggaggacgtgacgtatggaactgcttacccgaaacaatttcgagagctggatgcagaaactggttgaacggctcgaccgtcaggacgaactgctgctctccttgcaaccgtccggcaaaaccccaaacccgatggaacgtatcaggatgttcgacaaccaagacctctgtatgctgctccagatcagcaagcgcaccctacaacgctaccgcagcatcggcgcgttgccgtataagacgctcggcaaaaagacctattacagcgaggaggacgtgctgacgttcctttccggacacgtaaaggacttcaaaaaagaagatatagccttctacaaggctcgtatccataatttctttcaaaaataacccattaaaacatttttcaaatggcaaagaaaaaaagtgaaaaggacgtgctgatagtccgtgacgagaagacgggcgaaatcagcgtggtagccgggctggatgccgacggttcccccaagcgtacccccgcgaaagcggagaacgcgcagagtttcctgcaattcgaccgccacggcgatgtgctggacaacttcttcaaaaacttcttccggcagtgcaaggaacccagccgcttcggtttctaccgtgtcgcggcagaccaagccgacaaactgatggaggtgatgaaagacctgctgaaagaccccgaagccaacaaggaactgcttgcgccccacaaggtggacacttccggctacgaaaagcaggtgaaggaagaacagaccgccgaaaagacggagcagacggaacaaaagcaggaagagcagcccaaagaaaaacaagaacaggaagaaatggaaaagaagcaggaacagaatcaggaaagcccgcaacaacaggcacagggcagacggggctaccagcccatcgacgagagcaaaatcaactggcaggagttggaagagaaatggggcgtgaaacgtgacgaccttgaaaagtccggtgaccttcagaagatgctcaactacggcaaatccgacttggtaaaggtgtcgcccaagtttggcggcgaggcttttgaactggacgcccgcctttcctttaagaaagacggtgaaggcaatgtcagcctcgtgccgcacttcatccgcaaggagcagaaactcgacgagtacaaggaacacaagttttcggacgaagaccgtaagaacctgcgcgaaacgggcaatctcggcagggtcgtggacatcgtggacaaggaaacgggtgaaatcatcccctcgttcatcagcatagaccgcaagacaaatgaaatcacggacataccagcaaacaaagtgcgcataccggagcgcatcggaaagacggaaatcaccaaacaggaacaggatatgctgcgtgccgggctgcccgtgcgcgacaaacttattgagcgcaacgacggcaggaaattcgtcaccactcttcaagtgaatgtagagcagcgaggcgtggagttcgtaccgggaaccggcaggtcgccgcgtactgcccagacgcaggaagccaagaacaatctcacacaaggacaggctcagggcatggaaaattccgcagccccacagaaagagcaacgccgcaacacgtggacgaacgccgacggcagcatccgccccatcagcaaatggagcggcatgaacttcaccgaccagcagaaagccgattatgcagcgggtaaggcgataaagctggagaacgtgacagacaaacagggtttccatgccacgatgtatatcaagttcaacccggagaagggtcgtccttatcgctacgacaccaatcctgacaacgcacagaaggtagccccctccaacgaaagccgcacacaggtggcggtgaacagcgagggcaagaccaacgaggcgaccaagaacctgaaagagccgttgcagaagggacagaccgctccgaaggacgacaaacagcaacagcagcaggagaaaccacagaagaaaaacaacaagggcatgaagatgtaatctcccgtgtccaccactaaatccaaaatagaatccaaagtatcactaaaaagtaagaaaacatgaagacaatcattgcagaaaagccatccgtggcacgtgaaatcgcccgcatcgtgggcgcgacaaaaagagaggaaggatatttcgagggaggcggctatgccgtgacatgggcattcggacacctcgtccagcttgccatgcccgacggctacggcatacgtggtttcgtccgtggtaacctgcccgtcatccccggaaccttcacgctcattccccgtcaggaaaagacagagaaaggctacaagtccgacagcggcgtggtgtcgcagataaaaatcatcgcccgtcttttcaaggaaagcgagcagatcatcgtggcgaccgatgccggacgcgaaggtgagcttatcttccgctacctctaccactatatcggatgtaccactcctttcgtgcgcctttggataagctcgcttaccgacaaggctatccgtgagggactgcgcaacctcgaagcgggcgacaaatacgacaacctctaccttgccgccaaagcacggagcgaatccgactggcttgtgggcatcaacggcacgcaggcactctccatcgccgctggacacggcacatattccgtcggacgggtacagacacctacgctggcgatggtatgcgcacgttactgggagaaccgccgtttcacggtagaaccgttctggcagctccatatcgccgcagacggaggcaacggtgataccgtgaaattctcgtcctccgagaaatggaaagagaaagagcctgcgacggaattatataataaagtaaaggaagcaggcacagccaccgtcacgaaagcggagcgcaaggagaagatagaggacactccgctcctgtacgacctgaccacgctccagaaggaggccaacgccaaacacggcttcacagcggagcagacactcgaaatcgcgcagaagctctacgagaagaaacttatcacctatccgagaaccggaagccgctacatccccgaagacgtgttcgtggaaattcccaagttgctcgccttcatcggcaacctgcccgaatggaaagacaaagtcaatccgaaggcagtgccgacacgccgcagcgtggacggcggcaaggtaacagaccaccatgccctactcgtcacgggcgagaaaccgctgttcctctccaaagaagataataccgtctatcagatgattgccggacgcatgattgaggctttctctgaaaaatgcgtcaaagacaccgctactgttacggcggagtgtgccggagcggagttcgtggtgaaaggcagtgttatcaggcaagtcgggtggcgtgcagtctatggcgaggaagagaaagaggagaccatcatacccggctggcaggaagacgataggctggcactgaaagccgcctccatcacggaaggtaagaccaagcctaagccgctgcataccgaagcctccctgctgtccgcaatggaaacggctggcaaggagatagaggacgacgcgctgcgtcaggcattgaaggattgcggcatcggcacgcctgccacccgtgcagccatcatcgaaacgcttttcaaacgcggttacatggaacgttgcaagaagtcgcttgtacccaccgaaaaagggcttgccctctactcggtcgtgaagacgatgctcatcgccgacgtcgccatgacgggtgaatgggagaaggaactggcacgcatcgagcgcggggaactgctcgccgataccttccgcaaggagatagaggcgtacacaaaggagattacctccgaactgctctcgtgcgacaaactgttcgcccgcagggattccggctgcaagtgtcccaagtgcgggacgggcagtatgcagttctacggcaaggtcgtccgctgcgacaacgcggagtgcgggctgcccgtgttccgcctgaaggcaaaccgtaccctcaccgatgacgaaatcaaagacctgctcaccgacggacacacgaaactgctcaaaggtttcaagagcaagcagggcaagagtttcgatgccgtggttgcctttgacggggactacaacacgactttcgtgttccccgaaaggaaaagtaaggcaacctctgcgagaagaagaaaataatgagtaactttgccactgattcagagtaatgaactgttcttcgataccggattacactcatgctttggatttagtggtggcactcggagggataccgagtgccttttctttctcctttcagacaattatcccggtcatgatttaccaatccactaaattccaaagtaatgaacaacaagaagaaaaacgaggggcagaccgacttttcctactacggtctgtacctgctagactatctccgaacaaacagatttgaacaggcgaccgacgaagccttcatccgtgaacgcgccgaccgtgccgccggaacgtatgaacgggcaatgctcgaaggctatcccgccgcaggtgcgcaggaattggctatgcgcacgctgacggaggggcttcgctactccaagtacgccatcctgcgcgaagtcgtagagaacgagtttgccgacgacgtgccggaagcggagcgtgaatcctttacccgaaaactgctgccgcttgtcggaaacgtattctccatttatgacctttcggatgacaatttcgccctgtcgcccgattatgacctgctctacacggagctgacgggggctgtcgtcctttatatagaggaatatggcgtttaaccgcaaacaaaggttgcgggacaacatcgaggcgatacggacggcattcgtccttgacagggaacaacgcacccccaccgcacgcgaaaggctcttgttggagcgttattgcggtttcggtggactgaagtgcatactgaacccagcaaaggaactgacggatgccgtccattgggcgaaatccgacctcgaactgtttgcccctaccgtggaactgcacaagttactacgggagaatacaaaagacgatacggagtataagcggtacatggatgctatgaagcaatccgttctgaccgctttctatactccgccggagataacaggcactattgcggacgtgctgcatgaacacggcatacgccccgaccgggtactggaaccatcggcaggcgttggcgcatttgtggatgccgtattagagaacaagccggacgcggacatcatggcttttgagaaagacctgatgacgggcaagatattgaaacacctgcatcccgaccagaaagtaaggatacaggggtacgagaaaattgaaaagccgttcatgaaccattttgatctggctatatccaatatcccctttggtgatgtggcggtgttcgacccggaatttaccaacagtcatgacatggcaagacggtcggcatccaagacgatacacaactatttctttctgaaaagccttgatgcggtgcgtgaaggcggaatcgtggcgttcattacctcgcagggggtgttggatgccccgaccaatgcgcccatacgcgagtatatgatgaaccacgccaatctggtgggtgttgcccgtctgccgaacaacctctttacggaaaatgcgggtacggaggtgggcagtgatttgattattctgcaaaagaacagcggaaagaacgggaaactgtattataatgagaaactttttgtgcaaacagaacagacccctatcggcacttccgtaaatgggtatgtatggagcatcggttcgctttcccacacggatttaaccaaaagtaccgacccttacggaaagcctgcctataagctcatgcacagaggcgataccgtacaattggcggaagacttacgggaacatctgaaaatagaactgcaccaactcaacagggaactctacgaaagacatagcctgcatccgacgcaaacggaaagtacggataaaagtatgaatgtggaagtacagccgtctccgaaagtagaagcggtgacttctaccgctaatgtttttatcacagaagcggagaaaccgaaagttcaacccatagacgagaagccggagattgagccacgccagacgaatcattcaaatgccgttcagctcactctgcttgacctttggggtatgcccatagaagaacctgccaaaaagaaaaaggcaaccaaaaaggaaaacaaggcaaagcgtgctattcctaaaccgaaaccgccgattatggcagttcctcctgttgaatccgtcaagcctgcaaccgaaagcaagaaggcaaagccggaaagtgcagggaagcaaagcgaccctgaagatatttatgccactttggactgggacaccaatccacccatcaacggcttctatgaaacgatgatgagcctgacaccggaacggcgcaaggctctacggcttgaagcggaacggcacagacaggaacaactgaaaaagtcgggtatcaaggacacgatgaatcctgcctttgtgccttcgtcggataacaaaccggagcaaaaggaagcagcaaaacaacccgaagcacagccggaggcaactcccgttcctattacggacaatagcccaagtgagaaagcaaccgcttcactattcccggaatttgaaacggaaaagccgaaggaggaagcccccgaccttacgccgcgtccctatcaccgcacaccggaaatgcacctgcgtgaagggtcgctggtggctgacaggtcacgccgtaccgtcggctacctgaaggacatcacgccttacggtgcgacattccaaccgcttgatttgaaaggctaccagaaggaaaaggcgttgctgtatgtgtcgctgcgtgacgcatacgagcgactataccgctatgaatcgaacagtcacgaggaaaatgtaccgtggcgtgagcatctgaacacctgctatgacgagttcgtcatgcgatacggcaacctcaacgccaagcagaatgtgaaactggtgatgatggacgcaggcgggcgtgacatactctcgctggaacgggcggagaacgggaagtttgtcaaggcggacatcttcgatcgtcccgtttcattctcggtggagagccatgtcaacgtcggcactcccgaagaagccctgtccgcatcgctcaacaagttcggcacggtcaatctcgactacatgaagacgataaccgacggcacggaagaggaattgctcactgccttgcaagggcgcatctactacaatccgctcgtgaccggttacgagatcaaagaccgcttcatcgccgggaacgtgatagagaaggcggaacgcatagaggcatggatgggtgaaaatcccgaaagcggatgtatgccggaggtgaagcaggcgttggatgcactgaaagacgccgaaccgccccgcatcgcctttgaagaccttgatttcaacttcggggaacgctggattcctacgggtgtctattccgcctacatgagccatttctacagcacggacgtgaaaattgcttactctccgactttggatgagttctcggtggcttgcagtcacaagaatttcaagatatgggacgagttttgcgtgaagggctattaccgcagttacgacggcatgagccttttgaaacacgccctgcacaacacctgccccgacatgatgaagtccatcggcaaggatgagcatggcaacgacatcaaggtgcgcgacagcgagggcatacagcttgccaacgccaagattgacgagatacgaaacggcttcaccgaatggctcgaagagcagtcgccgcagttcaaggaacggctgacgacgatgtataaccgcaagttcaactgtttcgtgcgcccgaagtatgacggctcacaccagactttccccgacctcaacctgaaggggctggcaagccggggcatcaagagcatctatccctcacaaatggattgtgtctggatgctgaaacagaatggcggtggaatttgtgaccacgaggtcggaaccggtaaaacgctgataatgtgtatcgctgcgcatgagatgaagcgtctgaacttggcgcacaagccgatgattatcgggctgaaagccaatgtagcggagatcgcagctacctatcaggcggcatatcccaacgcccgtattctctacgcttcggaaaaggacttctcgaccgtcaaccgtgtgcggttcttcaacaacatccgaaacaatgactatgattgcgtcatcatgtcgcacgaccagttcggcaagataccgcagtcgccggagttgcagcagcgcatcctgcaagcagagcttgacacggtggaggaaaacctcgaagtgttgcggcagcagggaaagaacgtgtcgcgggcgatgctgaaagggctggagaagcgcaagttcaaccttgtggcgaagctggagaaggtggaacacgccatccaatcgcgcactgacgatgtggtggacttcaagcagatgggcatcgaccacatcttcatcgacgagagccaccagttcaagaacctaacgttcaacacgcgccacgaccgtgtggcgggcttgggaaactcggagggaagccagaaggctctcaatatgcttttcgccatccgcaccatacaggagcgcacgggcagggacttgggagccaccttcctctccggcacgaccatcagcaactcgctgacggagctgtacctcctgttcaagtacctgcgtccgaaggagctggagcggcaggacatccgttgtttcgatgcgtgggcggcaatttttgccaagaagaccaccgacttcgagttcaacgtgacgaataacgtggtgcagaaagagcgtttccgctacttcatcaaagtgccggaacttgccgccttctacaacgagataacggactaccgcacggcggaggatgtgggcgtggaccgtccgcacaagaacgagatactgcaccacataccgcctacgcctgaccaagagtatttcatcaagcaactgatggaatttgccaagacaggcgacgccaccctgctgggcaggctgccgctttcggaaacggaggaaaaagcgaagatgctcatcgccacggactatgcccgcaagatggctctggatatgcgcatgatagacccgcactatgaagaccaccccgacaacaaggcgagccactgcgccaagatgatcgcggagtattaccaaaagtacgacgcgcagaaaggcacgcagttcgtcttctcggacttgggtacttaccagccgggcgacgggtggaacgtctattcggaaatcaagcgcaagctgacggaggactacggcataccgcccggcgaggtgcgcttcattcaggagtgcaagaccgacaaggcgcggaaggcggtgatagatgccatgaacgccgggacggtgcgtgtgctgttcggttccacctccatgctcggcacgggcgtgaacgctcagaaacggtgtgtggcaatccatcatctcgatacaccgtggcgaccgtccgacctgcaacagcgtgacggacgcggagttagagcgggtaacgagatagccaagcattttgcaggtaataacgtggatgtaataatctatgcggtggagaagtcgctggacagctacaagttcaacctcctgcactgcaagcagactttcatcagccagctcaaaagcggtgcgatgggtgcgcgtaccatcgacgagggggctatggacgagaagtcgggcatgaacttctcggagtacatggcgttgctctccggcaacaccgacctgctggacaaggcgaaacttgaaaagcgcatcgcctcgctcgaaggggaacgcaagtcgttcaacaagggcaggcgtgattcggagttcaagctggagtcaaagacgggcgaactgcgtaacaatacggcaatggtgaatgccatgacggaggactggaaccgcttcctgtcggtggtgcagaccgacaaggagggcaaccgccttaatataataaaggtggacggagtggattccgccgatgagaaggtcatcggaaagcgtttgcaggagatagccaagaatgccacgaccggagggttgtacacgcaggtcggtgaactttacggttttccgataaaggtggtgagcgaaaggatactcaaagagggattggagttcaccgacaaccgcttcgtggtcgaggggaactacaagtacacctacaacaacgggcatctggcgatggctgacccgttggccgccgcccgcaacttcctcaacgcgatggagaggataccctccatcatcgaccagtacaaggcgaagaacgaggtgctggagatggagataccgcagttacaggagatagcgggtaaggtgtggaagaaggaggacgagctgaagcagttgaagtccgaacttgccgcccttgaccgaaaaattcagctggagcttgcgccacccacgcccgaagtcgcagaaaaggagaatgaagggcaacagctcaagccggaagcggaagatgtgaggaacaggcaggcgcaatatcccgaaaatgcaccgccgcagatacgcagtccggcggatagtatcgttgccaaccatgtcataatcgggcgtccgggactgtatgccaaggaggaaacccggtccaaaggattgaaaatataacctaaggaattttatctgaagtattaataagggctatcccaaaaggtctaaaagtaaattttatcctttctgcaagtatctataggatggcaactgcatttttttctttttgggcagcccttattaaaatttattcttattttaggttatatacattcatgtccatttatgtaaaaaattcctgctgaccttgtttatgtcttgtcagtcaccatttgcaaaaccatatttgaccctcaaagaggctgaatttgataagtaacttgctacatactcataataaggagctaaatagaacacgaatgggaaatacacaaatgctaaactaaagaagatattggccaaaataaacgctataccgagagagaaacttgatttttcaacttcctaaaacggtgttgttcaaacatttctacttatttgtacttgccagttgaacctacgcttccctaataaaatgtctatggtaaaaagttaaaaaatcctcccacttttgttagatatatttttttgtgtaattttgtaatcgttatgcggcagtaataatatacatattaatacgagttagtaatcctgtagttctcatatgctacgaggaggtattaaaaggtgcgtttcgacaatgcatctactgtagtatattattgcttaatccaaatgaatattataaatttaggaattcttgctcacattgatgcaggaaaaacttccgtaaccgagaatctgctgtttgccagtggagcaacggaaaagtgcggccgtgtggataatggtgacaccataacggactctatggatatagagaaacgtagaggaattactgtccgggcttctacgacatctattatctggaatggagtgaaatgcaatatcattgacactccgggacacatggattttattgcggaagtggagcggacattcaaaatgcttgatggagcagtcctcatcttatccgcaaaggaaggcatacaagcgcagacaaagttgctgttcagtactttacaaaagctgcaaatcccgacaattatatttatcaataagattgaccgtgccggtgtgaatttggagcgtttgtatatggatataaaaacaaatctgtcgcaagatgtcctgtttatgcaaactgttgtcgatggatcggtttatccggtttgctcccaaacatatataaaggaagaatacaaagaatttgtatgcaaccatgacgacgatatattagaacgatatttggcggatagcgaaatttcaccggctgattattggaatacgataatcgctcttgtggcaaaagccaaagtctatccggtgctacatggatcagcaatgttcaatatcggtatcaatgagttgttggacgccatttcttcttttatacttcctccggcatcagtctcaaacagactttcagcttatctctataagatagagcatgaccccaaagggcataaaagaagttttcttaaaataattgacggaagtctgagacttcgagacgttgtaagaatcaacgattcggaaaaattcatcaagattaaaaatctaaagactatttatcagggcagagagataaatgttgatgaagtgggtgccaatgatatcgcgattgtagaagatatagaagattttcgaatcggagattatttaggtgctaaaccttgtttgattcaaggattatctcatcagcatcccgctctcaaatcctccgtccggccaaataagcccgaagagagaagcaaggtgatatccgctctgaatacattgtggattgaagacccgtctttgtccttttccataaactcatatagtgatgaattggaaatctcgttatatggtttgacccaaaaggaaatcatacagacattgctggaagaacgattttccgtaaaggtccattttgatgagatcaagactatctacaaagaacgacctataaaaaaggtcaataagattattcagatcgaagtaccacccaacccttactgggccacaatagggctgactcttgaacccttaccgttaggggcagggttgcaaatcgaaagtgacatctcctatggttatctgaaccattcttttcaaaatgccgtttttgaagggattcgtatgtcttgccaatctggtttacatggatgggaagtgacagatctgaaagtaacttttactcaagccgagtattatagcccggtaagtacacctgctgatttcagacagctgaccccttatgtcttcaggctggctttgcaacagtcaggtgtggacattctcgaaccgatgctctgttttgagttgcagataccccaagtagcgagttccaaagctattacagatttgcaaaaactgatgtctgagattgaagacatcagttgtaataatgagtggtgtcatattaaagggaaagttccattaaatacaagtaaagactatgcctcagaagtaagttcgtacactaagggcttaggcatttttatggttaagccatgtgggtatcaaataacaaaagacggttattctgataatatccgcatgaacgaaaaagataaacttttattcatgttccaaaaatcaatgtcattaaaataatggagcggtcaggaaatttctataaggcaatacggttgggatatatacttatctccattcttatcggatgtatggcatataatagcctctatgaatggcaggagatagaagcattagaacttggcaataaaaaaatagacgagctccgaaaagaaataaacaatatcaatattcaaatgataaaattttctctattgggtgaaacaatactggaatggaacgataaagatatcgagcattaccatgcacggcgtatggcaatggacagtatgctctgccgtttcaaggccacctatccagcagagcgcatcgatagtgtgcgcagtcttttagaggataaggaacgacagatgttccagatagtccggttaatggatgaacaacaatctattaacaagaagatagccaatcaaattccggttattgtacagaaaagtgtgcaggaacagtccaaaaagccaaaacgaaaaggtttcttaggcatattcggcaaaaaaaaggaagtaactccagcagtatcaaccactatccttcattcggtcaatagaaacgtaatcagcgaacagaaagtgcaggatcgccaattgtcggaacaagccgacagccttgcagctcgtaatgcagaacttaacagacaactgcaagaattgatttgccaaatagaagaaaaggtacaaaccgaactgcaaagccgggaaaacgaaatagttgccatgcgtgaaaagtcatttatgcaagtaggcggtttaatgggattcgttcttctattgttgttaatttcctacatcatcatacatcgtgatgcaaaaagcattaaacaatacaagcacaagacaactgatttgataaggcaactggaacaatccgtacaacggaacgaggcactgataacgtcaaggaagaaggcggtacatactatcacccatgaactgcgcacaccgctgacagcaataacaggctatgccggactgatacggaaagaacagtgtgaggataagtccgggcagtatatccaaaacatactgcaatcctccgaccgtatgcgggatatgcttaacactttgcttgacttcttccgcctggacaacggcaaggaacagccccgtctgtcaccctgccggatttcagcaatcacgcacacacttgaaacggagttcatgcctgttgccgtgaacaaagggctgtccttgtccgtgaagactggacacgatgccattgtattgaccgacaaagagcgaataatacaaatcgggaataacctgctgtcaaacgctgtcaagttcacagaagaaggcggtgtttctttgattactgaatatgataatggagttctgacactggtcgttgaagatacaggtacaggcatgacagaagaggaacagaaacaagcgttcggtgcgtttgaacgtctatcaaatgccgccgcaaaggagggtttcgggcttgggcttgccataatgcgtaatattgtgtcgatgcttggcggaacaatccgtttagacagcaagaaagggaaaggcagtcgtttcacagttgaaatttctatgcaggaagctgaagaacagcttggatatacaagcaatacacctgtttatcataacaataaattccatgatgttgtcgccattgacaatgatgaggtattacttctgatgctgaaagagatgtattcccaagaaggaatacactgcgacacttgcaccgatgctgcggcactgatggaaatgatacgccagaaagaatacagcctgttgctgacagacttgaatatgcccgatataaacggtttcgaattgctggaactgttgcgttcgtccaacgtgggcaattcaccaacaatcccggtggttgtggcaaccgcttcgggcagttgtaacaaaggggaactattggcaaaaggctttgccggatgcctgttcaaaccgttctccatatcggaactgatggaggtttccgacaggtgtgccataaaagcgacaccggacgggaaaccggacttttccgccttattgtcctatggcaatgaagccgtcatgctggaaaagttgataactgaaacagaaaaggaaatgcaggcggtacgggatgcagcaaaagaaaaagacctgcaaaagctggattccctgatccaccacctgcgcagttcgtgggaggtgctccgtgccgaccaaccgctgaatgtactttacggattgcttcgtggcgatgctctcccggatggtgaagcgttaagccatgccgtgactgccgtatggctgtcaatggcggtgaaacggctgctttcatagctgtctatccaccccttcagggtatcaactccccacgcttccgcatcgtcaaagatgccgtccaatgccttgataggctcgctgaatctgacgatcagtgtttggtagcctgccacgttcatcgcttgccctcctttccttcctttgccgtcagccacttgtcccgtgcggttcggcactcgtccaacgtgggtttgacacaagagaacaactctccgtccgtgtggcggtaatcgtattgcacaagtgttcgcctgcgtctgccaatacccatttgaaatttctcgtatttctccgtacctgcttccgtgcaggtacttactccgttgattgtcattcgtgtactcataatcgttgttttttagatggttagaaatgtactgacaacactctgttctgcatcaccatatcgggattgcttgtgtagcgttggtgcaggtagaaatggtgtgagccgaagccgtaaagaaagaacttgtcaagttcgtgcttctcggaaaagtcttttacgcttgctcttaactgctcctcactctgacaaagagtgaggaggtttataaattcaaggaacatcgaggggattttatcgtcccacaaacaaatcatactttcaattcttacttccatgctgttatgtattataagttgatattatgctgcgttcatacgctgacggataagtccggcattgtcctccacaagtcggatgatgcggtcgtggtactcggtattggaattgcatacccctctgctctgtaccactttcagcgttttcaaactgacttctatcgtttcaatccgtttgccttcaatggtggcggataggatgagagagtttgccttgttgtgataaccgcccacgcaatggtgcatcagccgtccttcctcaatcatttcctccacgctttcaatgactttgacaagaataaggttgtcggaaaatacaagcccgaagaacattcctttgtctttcagatagttcttctcgtcctcaatcgccttttgccgttgctgttccgtccgctcacgctccctttgcaggttgcgctttgccaccaacttgtcgtgttccgctttgaggtcggcagggcagacgtatttcgggctgttcgtgtccttgccaaaatgacgcaggaggtctatggtgtcgcaccatacggagccgtctgaaatggtgtaaccattgcggatgcaaatcttgacggatgcccaatattgctccatgtcaaaggaactgcgaatatagtggctcaacatggcgtattgccctgccttcaagagtgtttcggcttggctgtcggaaaggatagccgtgaaaaggtcatacggcagtgtgttgtgatagtccccgttgaaaccgttgcgtttcagttcggggatgaaacgctgtcggggataggtacacacaggtgctatatcgtatgcgtgaagtccgttgttcttgcgcacctccatgtcgctgtattccgcccattggtcgtaatacaacattgacataccacgaagtcgggcaacggtggtggttgtgcctttgggcgaaatccacctctgcaccacttcataaatggaatactcggctgcttgccctgccttgtatcgggacttgacgaagaagaagcgtatcacttgatactgcttgctggtggtgacaatggagaagtattcattctcgctgaaaacgctctttcgggtgcgcaacgcttccaactgcataccgcaatgggggcagatacatccgcaaagggtgtctgcaaggtcgtggtcgctcttccacgaatgtccgcactcggtacagatgttcgtgccgtccgctctcttgattgcgtagtgcttgaagcaatgacggaaagcgtatgccttttgcgtggcggtcaatctcggtagtcgcttgctcagatgtgcgacttcctgctgtatgtgtgttctcggtttcataagcctaaatcaaataatgagggttgttgtatttcttggatggtcgctttggtggcggttctcggcttgttgcggttctgcaacttgcggagttcctcgtcttggtattgtcggatagcgttctgacgtgcttccgccttttcctctgcggtgagttccaccacatggttcacggctacttggcattggataggcttgcccacctctatctcgttctcgtcatagtaatgtacggcttgtccgtatatctccccgtccgtgaagccgttgcaaccgcttttctgcacatagttcagaatgtaggtcacgcaatcgtctatgttcttggcagggttacggtatttcttggcaaagagcgcatcttccgctgcacgttgctccaaatacatctgtatcgttctcttgaaatggtctgtcgttttcatatcgttatcggtaagattaaagggtgaataaccaaaggatgaagccgaagaaggcgattgcggaaaggatagccacgattatgcctatcgccactcggaacactccgtttactatctctctgacgatgccccaaaggatgccgaacacccaaagggcggtgcgcatgattagggcgcatatcgcaagccctatgtattgcgccacttgtctgaagtctgccgttgctgtcatatcctcgctatttttcaagttctacaatgttgtctatcctgccgtataggtatctgcgaagtccggtcttgtccgttgccttgtattccgtccaacgtccgtattggcacacgagaaacgtgcggagtacatcggagaagtcaaacctccagccttgcagggggactgcgctcttgaaataggtgttgctattcaccttttcggtgagccaatctttttcctctcggttcatctgtcctccgttgttcagtttttcacgaaggatgtaaaccttactgcctttcagtgcttccaatgtcggcacttcccaagccacgaattttgttgccattgttgttcccatatctgttctgtttttgatttttattttttatgcggattcaagagctgagggagttgagtttcaaactatcttatctgcctctcgtttatccgacattttttttaatgcgtctttctgtcgcatcggtcgttttcgtttcgggtgcttaaaaaggtagggattagggaatgcaaggttttttcgggaaaaatactacccgcagggctggagatttttcccgaaaacaggaggcttgaccttgctttcccgtcaaatcccggagttacctttgcgcccagaacggaaatgactgcctgatgcggcttactgaaaggcgcgaaaatggaggtaaacggaagtagaggcagattatacaggaaacttcaaaagagaaatccgtgaaaaaaggaagtccccaacaaaaaaaagacatagccggtagcgtgaaaccgggcaaaccacctgcaaggaagtatggttttatctgtccggccggacgtgtcggggcgggcagataaaatcattcttcccggtttgcctgctgtgggtgacggcttgttccatttatgggcaagcggtcatacacggctttccgcttccggctcaaaggaacagcgaaaaagaaaaattatctgaaaagccgtaaaaacacctctttggcataagcacaaaagaaatgggctttgcctcatcagtctaaactgttgcttaggcgtgaggcaaagcccttttctccgcttatgcagtagtcggcacacgttcgttcaaaatccttttgggcgatggtgtgccgacgaataaagccgcttttacggaaaaatttgtatgagatagaaaaaatcagggagattcatatcaaaatctcccgttttattgttacttttgcatatgaagagttctttgaaggttacgcaacgcgcagaggaataatgcagcagataactaactaaatcgtaacctattactatcatgagcatctaacctacgctcatttccaataaattacactcttttcgtaacttcgaaagtacaattatattgtgcggtctcctgcaacgatttttctacacttggctaacgaagaatcctatcaacttctctttgggcgagctatttacgcctattgtagaatcagagaacgccatagaatctatggatgctactgaaatactgcccatcgagcaaccgatgggtttggctgaacaggagtgtcctccgtcccaacagtcaaatcaaaatactgtaaactctgattgtccgcaagattctcatttgaataaatatgattccatattagtggaactcaaaaagaaagagattgaaaggcaagcggaaatcatggatgcgattcgggaatatgtaaccgtcaagactgccccctatctctccaaagaggatattgccaccctcatttccaatatagagtatatggcttacgatcaacctgagtcatataaaccgattcgttccaatatagacaatccgctgaggtcgcctggacttcgccatttggcatggaatgtcggtgaacgcttgggagtacccttggcgaaaagagccgtttttatcaaagaatcatttccatacgaactcgtaaacgcgacccttgaatatcttaaacttaatttacgggataatgttccaagccagattcccattgatgtaccagataaaggcgactatcgcttccatttagatgtagataatgatgactcgcaataaaaaaagtatgcagacgaaataattaatccggtctgtattgttctgcaaggtttcattgagttggttcgcagcatgttaaacgattaaaatagtcataatatggaaaaagaccaactgacattcaacgacctgccgaatgtggtaggcgaactatgcgacagaatcgcaagtatggaaaacctgcttacggagaaactttccaagcagtacgaaaccaaagagaacacgcacgtccccatgaccgtacaggaggcttgcaactatcttaaaatgccgttgtcgaccttttattacaaggtcaagaaagacgatattccggttataaaacagggaaagcatctctacatctatcgtgacgaactggatagatggctggaatcttcccggaagaatccggctccgcaaagtttcgaggacgagaatgagtctttgctcgcctcccatcgccgtaaaccgaaccctaaaaactggtagcgatggaaaagacagacactattattctttctcctgaagaattggccgcttacatggcggagtctacaataagcgtaacgagtacatacgaacactccccggtggttctgatggtggacgataccattatcggaacattgggaaacttcagtgcttccatcggaaaagccaaaagcaagaaaactttcaacgtttcagccattgtcgcatcggcattgaataacagcaccgtacttcattaccggtctacatttcccgaaaataagcggaaaattctatacatagacacagagcaggggcggtatcattgccaacaggtattgaaacgcatattacgtttggccgacttgccggaatacaagaatccggataatctgattatgctggctctgcgcaagttttcccctaaactacgtctggcgatagtcgaacaggccattggcataataccggatttgggattggtcatcatagatggcattcgtgatttcctttacgacatcaattcctccagcgaatccaccgacatcatctccaaattcatgcagtggacggatgacaggcaaatccatatccataccgtcttgcatcagaacaagaatgatgaacatgcccgtggtcacatcggcacggaactaaacaataaagcggaaaccatcatgcaggtcgaagtggacaaagaggacaaagctgtaagcgtggtcgaagccgtccatatccgtgaccgtgagtttgagcctttcgccttccgcataaacgaggaagccatgcccgaaccggtagagtcctatctgcccaaagagaagaagaccggacgaccaaccaaaggaccgttcgatccggacaaggagattccaaagaatgtacatcgtccagcattggataccgtttttgccaatggcaacatcagcaattacgatgattatatagaacgcttgaaagagggttacggattgcagggtataaaactcggttataacaaggcggtaaaggtcgcaacattgctcagcgacgaacgaatggttataaaagaagggaaagattatgccttcaatccagaataccattattgagttcaactttactttattgtcggggcgtatacataagaataaagtaaagtcggcaggaagacatcatgtgagatattcatattctcccctcttttagaggctcatttcattctatgtttcctatccgagtgccagttcactatacgcatccgatatggcttgccgtgaagcatcaacaggtaactgttgcgagatatgccaaggtataacctcactgcgttacggttgtacattggcgctctcgcctgctcagttccctcgccggtgcggtactcgcaagctcgcacctattcaaccattataaaacgattcaaatgaaagaagatattgaaaatacatcggactcctcgaaagaaaccagaagtgtctttatcggagctaaagtcactcctactcagaaggagcatataaaatcactggccgggcaatgcagcatgaccgtaagtgactacatattatcacgtgcgtataacttcaagcccaaagcaaggcttacgaaagaagaagctgctctgttgcagaatctggacgattgtcggtcagacctcataaaatacacatccgccctacacggaatgtccacaaagcagcgcatggcaatgttcaatcagattccgttcatggtcggctggctcaaggaacttggcaatgtggccgaaaatgtctgccagttcctgaatgcagtaaaagagaagaataaaattccgtctaacccaaaatccgaagaagaatgattgcgaaagccaaagccatatcgcacggtataaacgacatccgttacattaccggcgaatcacagcacaaaaaacatccggagaagatttatcgggtattggacaacctattgccctcagaaccggacgctatggggatatggaactccatgcaattgaccctatcccagcatcgaccgataaagaactccgttatcagaatcgagctgagtccttcgcccgaacatacccagttctatgacatagaggactggcaaaagctctggcacgactttgctgaggagttcgacaaacaagtgattatcggcaaggacggaaaagtccgttcttgccaaaccaatttggctaatagcaaatactcggtttggctgcatacggaatctaaaggcgaagtcccccatctccacgctgcgatttgccgtttggatgaaaatggcaatatcaacaatgaccacaacattcatcttcgagcacaacgtgcagccgagcgagtggcaaagaaacgtggctggacgactgcagcacaaatccgaaatctcaacattccacaagtaaatcgggactgcatggaggtgctgaaagcaatgccattgtggtcatgggatgactacaagaatgctcttatacggaaaggttataccgtccatgaaagggaggacaagaaaggtcttctccgtggatatgctctcatgaatggaaacaccaaatacaaggcttcagaattgggaatcggcaggaacctgatggtctcgaaacttcctgcaacatggaagagactgcaccatcagccaacttccgtcattagaaataatacttcccaaaccgttcaacaggtagcgacacataaggttgcccctattgactatacccaatatctcacatatagtcaggatatgatttcctatgtcctcagtcatgaaggcaaggattacaaattctatatcccagaaaaagtacttgactgtttcaatgacgaatttgattacaggtttattgccaactgtcaggaacttaccgatatggctgtagctatatttgtcggactgataaatccccccaatgtaacaaccggtggaggtggtgaaggttcgcaaagcgagcttccgtggagagacaaggacgaagacgatttgcaatgggctcgcagatgcgctcgtgctgccagccgttcgttagggaagaaaccgaaaacaggactaaaacgctaagcccatgaaaaagaaatttgatttttccgcagaaatgagtgaagtggaatccataaaaaccactcccaagaatgaatatctggaagaagaaaaacgactactcgatgtaaatgccaaggaacttgccagcctgaatgacaatgtatataagctgagaatagaagttgaaaatctgtccggctctatacgaaagtgcaaacctatcatttctgaagaaatgcaaaagttggcaattgaatttggagcaacacttctctgcaattttcttggtcagattgaaagcaaatgcaaggaagccgagcggagaataaaaaaagccgacaatgctatccatatcccggctaccgcattctacattttgattatcattgtagtcgctctgtcttcttttttcgtgtgcatgatagtggctaatgcagagattttgcattccggattgatttggaaagcagttatctgctgtattctcattgccgttttaggaattggtatagcgttaatagtacagaagtttttagatagaggtaaataaacgaaaagtctcaatcggatagagattgctaccagttgagacttttataatatgcctatgttattgaaattttattacaggaactactttttcaccaagtttggtctcataacgaaatgttcctatttgcatagcctttttacctttaggtacttcaattacctgatcatcataaaacagattctggccatctgtcacaatatagacgaccggcccagtaaaaaatgaagttgaatgccctttctcctcacaattggccaaagcaccatccccaagaacctgaaaaacttcaaattttgttgcggtagtaaataccgtctgttgctcggcaatcgtaatatccgattcgttagcatttgaattggtaatacctataacaaaaagtactgcaattgttaatacacacccagtaacaattcccaagaagaatatcaaaccctttctcataagtaatatttttaataacattcaaatatacaacataattctgaatcacaaaacaattgtgagcgaagaaattacagcattaattccctcgctctatacataactttatttacccagtgacttgaaaaccttggtaatgcaacgctttttctgctccatattgggatgaacatataaatccaaagtagttgaaatgttggaatgccctaataatacgctgactgttttatagtcacaaccgacttctatacagcgagtcgcgaaactgtgacggagtccatgatacttcagcttgggaatatcaagtttctccataagccttttatagtagttgcgatatgtgcgtggctctgtcggacgctcatcattagtaagaatgtaataatcgtcattaattacttttttcaaaggctttaacatagtaagcaattctttgtttatcgggatttcacggcaagagttttttgtctttggcgtgttgatgaccagctctgtatgttttctctctccttctatgatatagatgcgttctatcgtccggttaacggttagaatcccgtcatatacattgatgtcgctccatttcaaagcacagatctcccctatacgcagaccggtactaaggctgatatagataccaagtcccggaaaggaaaagtggctctgaatatagttcagaatctttttatgatttgccacggacaagacctccaactttttaccagcaacgtctgttgggtacttaatatcccattcgtaatagttcatccattcgtttttcaccccgaatttcataaccatctttaggacaataagaatgtccttaacagatttcacgctcaatccgccttccaacttttcaagcacaaagccttgtacatcattttcatgaagttcgttactctcaccaaactttggcaaaatgtgattttcaagaatcaacatgtaggctgccaatgtcgattgtttcacatacggtcgcttgttctctcgccatgcgtccgaaatttctctaattgtcttctgaatcataattttgaatttaattggttctaataattagagaaatataataggtaatgttccccatttgagatttccggagtttagtggagagtggaacaagtacaccataaatgatttagcaacagtggttggaggtggcacacctgatactacagtgaaatcatattggggtggagatatacaatggtttactccaagtgaaatcggtaaaaataaatatgtagactttagcaaaagaactattacaagagatggtttagataattcaagtgcaaagctattaccattacacactatattattaagttctcgtgccacggtaggagaatgttctattgcatcaaatgaatgtactacaaatcaaggttttcaatctcttattgcgaaacaatgtaatattgattttctatactacttgattcaaactaagaaaaaagatttgattagaaatgcttgtggatcaacattcttagaaatctcagcaaatgaaattcgcaagattaaagttgctgttcctgtacaaaacgaacaggaacaaattgcgaagctcttatctttaattgatgagcgtatcgctacccaaaacaaaatcattgagaaacttcaatccttaatcaaaggacttgcagcacaacttacacagtcaggaactcccaatatacgcttgtgtgattgccttgaatgccattcatccacattgcaagaaaattgcgtatctgtgactggctcatatcctgtatatggtgcaactggacttattggctataccaacaactatgcttataatggcgaatcaattttaatagtcaaagatggttccggtgttggttctttgtcgtatgttaatgaccatttttctgtaattggaacactcaactatctaacagccaaagaaaactactcaattctttacctgtattatgcacttatggcgttcaatttcactccatatataacaggaatggctatccctcacatctacttcaaagattatgggaaggcaaaattattctatccatccattgaaaagcgaataaggattgcatcattgctacataacatcgagcaaaagttagttgtggaacaaaaccttgttatatcactaagcgcacaaaaatcttacctgctgcgtatgttgtttatataaatatcatgtgcaatagatattgtttctgtaaattcaagaaccttaaaagttcctgttctatagacagtttttcctctattgaggatgttaagtttgttatattcttttgttgtgccatagatggtaaaggacatttgatatgattgatgtccttaagatatgcagttttcattgttccctctgtaataattctgcttatttcttttgagaagtaagaagaagacatcagcaaatacaaatactctacattgatatttgtgttcggaacaatgcccaatataccttgcttggtacaaactggatattcatttatagatattgcacctatggtagcaccattggagtatataacagactttgatggaataagccatgctgatgatttttgcatacccagttctgttataaagtctttattatttgtcagatatttacaagacaagtcttcaatcttaataaatggaattgtgccttctgtataatattcaactaccgatgtcgtcggagtgccaccttcaccagctttaatatagaaagaagaaaacggataaagttttcctttcaaaagaactgtcatcaattcgtcaacaagtcctttgattaaggattgaataacggaaatgtctgcgattagtaaacaggcatttgctcaaaagcctaatggatggaatagattagacactttgttctcaaaaggtaaggctggcggcactccaacttctacaaataaagaatactataatggagaaataccattcttgagtattaacgatataacaaagcaaggtaagtatgtccgatacacggaaaatcatttgagccgaagtggattagagaactcttcggcatgggtggttccagagtatagtttaataatatcaatgtacgcatcggttggcttggtaactataaatgaagtacctattactacaagccaggcaatgtttgcgatgcagctcagagacaaagatttattggattatctgtactactacttgtcatattttaagtatcgccacatccacaaatatcttgaaactggtacacaaagtaatattaacgctgatattgttcgcggaataatgattccaacttatggacatagtcgcaatatgaaaattgcgtcaacactgcaaggcattgatgcgaaaatggtagtgtaaactgaactgtgtcacggctctgttttttattctttccctcttatttgtgtgcagatttcacatctgcatacaaataagaggagcctttcacaggcaaagttacataatcttgaacctatcaccaaattttatggcaagttgctgtgatatcagtgcccaattagacagtggcatagtccatttcccactaatgtctcgataggcaagatacacaagcttttcaagtgcggtgtctgacgggaacacacctttgttcttcgttactttacgcacctgacgatgatagccctcaaccgtattggttgtgtagataagtttgcggattgcaggagtatactgaaaatattccgtaagacgctcccagttgtcgcgccaggatttgattactatggggtacatctcaccccatttttcatcaaccatgtcaagctgtgctaatgcagaatccttgcttacagcaccatatacggtcttgagatccttcagaaactctttctgatgcttgcttcctacatacttgattgagttacggatttggtggactacacatagctgaacggaggtttccgggaatacactttggatggcatcagggaatcccttaagaccgtctacgcaacaaatcagaatatcacgtacaccacggttctgaaggtcggtcataacatcaagccagaagttagcaccctcactctcagatatatacataccaagaagatccttgtgaccagacttgtttacacctaggacattgtatattgcacgagtgactgcacgacccttatcgtcttttaccttgtagtgaatggcgtcaagccagcaaatggcatagacggggtcaagcatacgggacttccaggctgttatttcgggaataactcggtcggttatagcactgatggtttctgctgaaagggttgtgttaaactcacgctcaaagtacttgcttatatcacgagtgcttgtaccaagagcatacatgttgatgatttgatctgccataccttcagcaagaattgtctcacgtttcttaactgtctccggtttaaaagaaccgtcacggtcacgaggggtttcgactatcacctctccatactttgtctgtacggtcttgctcatcttgccgttacgacgattgccagaactgcagtcaacgctattaaggtgagcatccatctcaccttctaaggctgcgtttaggatacgttctagcataggagccaaagctccgtctttaccgaagagtgcttcaccgctacgcagctgctgggctgctttcttgtagtctatttccaaattggccatattataaaaactgtgttaaactattattattatagcctgacacagtttattttacactctcgcgaaaatcgacaatgagttatcagttcttaaactattcaataggcaaaagaactatcttttgtcccagatgtttatatgaacatctgggtaaggagatattgcttctgcatggttaacaaggttagtcttcgcagctcattaatgatgcactcatcgtatgaatgtagtatttttgcagcaaaaagaatgttattgccatttgaggaatacggtaacacatagttttctacatcccctttaccaatattcatttgggcagcaccttgaccacaagctatcatactattctcaaatctttgagaagatagaatttgatataggaactcttgatttacatttttcgcaagttgtaacaaaccaactcgttggttgagtaaatagttcccattcttacaaagagaaacacgcccaacattacccgtaagagatattaaaatatctccttcttttaatacttggtggtcttgtatatcgttcggcaagttgattatgcaattgcaatcttcatcgtttatatatcgctcgccaggcacatttgttattgtgaggattttccatttgcccagtgcattatacttgccactctggaatgcgtaaccatttttcaatgtcgcaatattcgacaagcatatagtagtttctaacaaatcttttcgtgcgaacaaatatttactaatcgcagactttagttttttcaaatcctcaatgattttgttttgggttgctattcgttcgtcaatgagagatagaaattcagctatttttctctgttcctcaattgatggaaaatataatgatattttggataatccttcctgcccaatattgaaatgttgtgctcctgctcccattctgcaagttcttttgcgcgctaatggcgtagcaagcaaatacttaaagaacaaaggatcataattgccgattttacgaccacgaataacaaagcctccataaatggcggtacgattatccatgtacacattagctcgtccaacatcctccaatgtttctgagctacgttggaatagcaaatctccgtctttcactccgaaacattctatttctttttcagtagcattgaccttgccacgaatattgtcataattgataactccttctgaaagaatatccatcaccgaaatgaatggtagtccacttccaatacgtttagcgtctggattaagaccattcttgaactccaaatattcagaaagcgtatgctcttcccactctccactaaactccggaaatctcaaatggggaacattgaggactttattttcgttattatctgccataatcattattctttatcgggattgatatcaaacggcaacaatttgtcaccatcattaaaccggtcgaaatcggagataaacgaacggtcttgaatcactttatatttttcatactcaccatacgccttctctcgtgcctcttcttgagaaactttaccggccgaatcttgtgcttgatagtccattgtagcaagaaactgttcaagacgctgcttccagtctgccatcgttgtaatgatatggcgttgagcacgctgttctgcaaattcaagaaatgcgttagttacgccgttgagttctgaaacctctttgtcagacaagtagttctttgctacaatcgtatcagatttctgtactctgccattgggagcttttttccaagtagtcagtcccatgtgcggcatttccgagtcggcacgttcatatactatttcggcagcagtacgatgagttacagccaagtgcatcatgttttgcaccatcttgaagaacaatttggtacaatccgacttcgggtcgtaatccgcactgcattcggcatagatgtctgttatcttttggtagtatctgcgctctgaggtacgtatctcacgaatacgctccagtaaatcgtcaaaataatctttgccaaaatgttttccctgcttcaaacgttcatcatcaagcgcatatcctttaataataaactccttcaatacagatgtagcccagatacggaactgggtggcttgatagctattgacacgataacctaccgcaataatagcatccaaattatagaacagaggtgtacgttccacatccctttttccctctgattgaactatcccaatttttcggatagttgcctcttttgtaagctcgcctgtttcgtaaatctgaccaagatgatagttgacagtccgtacatccaccccgaacaaatcggccatacgcttttgtgacatccaaaatgtttcactgttgaatatcacttctattcgtgcctcgccttgcgccgttttatacagcaaaatgttagaactcaacgaattttgcatcaattcgtttatcgaaattgttcgagtaaaataatcgcgagcttgttgtaccaacacttttttgacattggcattttcggcaacaatcatacatgccatacgagacagacggaagatattgaccttacggaatgaaccgcttccaatccttaccatatcaaccgcttggttgaaatggtcgtctacattcattcctttttcacctgccaccttgatagccttgtctatgactctttggaatttccaataagccgaatagcccatagcagcgcacaggtcgcgagaactccagtattcgtttccgccctcatcctgacggcgtatattgtcgaatgatggacgcatttcggggatgttgtctatctctgccatagtgtaattattcaaccagtcccaattctttcaaatagccttctatctccttatccagttcggctcgcttggcttccaattcctttatttcagccatgactgctttgatgtcaataggctcttcttcctcaaaagtatcgacataacgaggaatattcagattatagtcattttcggcaacctcctgtaacgtagcgaggtgactgtacttttcaatttccttgcggtcacggtaggtttctacaatcttctgtatatgctgagggcggagtttgttttgggtcttgaccttttcaaactctttgctggcatcaatgaacaagatattatcgtcttccttacggcatttcttcaatacgagaatacaggtcggaatgcttgtaccatagaaaatattggcaggcagcccgataatggcatcaatatagtttttcttctctatcaggaaacggcgtataacgccctctgcattccctcggaacagaactccgtgcggagcaacgcaagccatcgtaccaccttcattgaggtgatgaaccatatgcagaataaaagcatagtcggctgttttcttaggtgcaagtcgtcctgctttactgaaacggtcgtcgttgttgaatttgtcggcagcactccattcggcagagaacggaggatttgcaaccactgcatcgaactgcatatcatcgaatgcgtcccattcaagcgtatcgccattctctattttgaagctgctgaatcggataccgtgcagcaacatattcattcgggcaaggttgtaagtagtcggatttttctcctgtccatagatatatgccgccttaccgatacttgctgcacggagcaatagtgaaccactaccgcaagtagggtcgtaaacattacgcaaacggttatgcccaagagtaacaatctccgccaatatgcggctgacctcttgcggagtatagaactcaccggctttcttgcctgcaccggcagcaaactgactgatcatatactcataagcatcgcccaaaatatcaatctcctgagaggcctccactccgaattttatatcatcaagtgcaagcagaacattgcttataagcgtattcttgtcatcggttgtctttccgagcttaggggaagcaaggtcaatatccgaaaacagaccaccaaaatcctcttcgctgtcacgtccgagcgtactatcctcaatgcgtttcaatgagcgttccagcatcggaaggatattttctttccgcttgatagtttcgattacagacgaaaacaagaatttcggttcaatgaaatagcctatattttccaagcattggttcttgacctcttcctgcaattccgcagcatccgaatcggtcatttcccataattccttgaatgtaacttcatcatcctccaatgcactgttggcgtatgtttctatcttctccgacaggtatttatagaaaatgaatcccaaagtaaaatacataaaatcgcttgccgacatattgccgcgcaaacggtttgcgaccgcccaaagctggtcacggagtttctgttgcagttcttcactcatatccttattgctctatattattctgtattacatcactttccggcaatggtatattgctttcaattatacttctcaggtcatccagcactttccctttatatgagaaatattttgccccttgatatgcacctgatgtattccgtttctcttccggcataaacgtaccgacaaaaggggacaatttataaatacgaccttgatattcaacggaatcatcgcttgccaccttgacttctgtattcgtaggcatgaaggtaacacattcccctattttaataccgaccatgctgaatttgaaacgccctcgctttacggttcgcttctgcacgacaggcaatgaatctttttcgttatggcaaaccggtttattatctacatagaccgtaacaaccgcatcatcaatcatcttggctatgtcattgaatatatccaaagctatttgcggcggcacattgaaaaactcccgattctgacgaatacgcaaatccgtcaaccgatcaatagtcttgtgtacatgcttttcaacatcgttatatttgaccgtctgaatggttgcataaatctcaaaaggcaacggaacagccgtgttgtcaagttccttggaacgtatatctacaggccgcgcacttttaccgattttgacccaatcctcacgaaaacttggattagtcaagatatacacatatccgggttcatttgtctttaccatatcagtatttcttttaatcccaactgaaagtgcgtatgatattacgcaatctgtctaaaatcctcgtcaacgcctttctcgtctttatcaatccgagatgcttctctttcaatgccttttgtatgatttctggctgctctttttgcagataatcatattctttaaggaaatgattcaatactgatgacgatattttctcttcctcagccaatgagttgacggcattttctcgttcaacagcaatatagcggttcaaccgttcttccaaatcgcttgtaccgtcagccttgcctcgctgcatcatgaaattttccttatcgtcatccacattcttttgaatgaagccatcaataagttttgccttgctgcgcatttcagcatccttaatcatcgtgtcaatgatattctggcggcgttccgcgtaatcggcactatatgggtcaagttctgcaatgagttcaaggatatatgccacattgataatgtcgctatgtaggagttcaaggcagaaatccacatcaccgaggtctccgtcatccggaacatctgtatcatcatccggtttgggtgacggtgctggaacaacgagtgcaaaagtatcatggatatcaagatacttacttctgaaatccataaattgctgttccgtcatgccgagatcatcagactcttcattataatcctcgtatatctgtatttcagcatgtttacggataatatcacggaacgccaaaacaaactctttcttagctttttcactctgcaaaaggtctatacaatttgtgtccggatatttcttcaaaaaattggtagcaagctccttgtattcctgtttgacttcttcaaacggaggtcgcactatttcttccggattgttactgttgctgaacaatttgatagcggtatcaacattgcttttcaaatcacggaaacacacaatctttccgaagcgtttcttttcattcagcacacggtttgtccggctgaatgcctgcaacaagccgtggtattccatattcttgtctacataaagcgtattgagtttcttgctgtcaaaaccggtaaggaacattccgacgaccagacaaagatcaagcggcctcatatcaactcgcttctttttcatacgcaggttgatgtcatcgtaatatgcacggaagttctctgtcgtaaacgatgtcccgaacatttcattgtagtcatccatgatggcttgcagttcatcaacctcaccggcactgtcattcagataagaacctgtacccattcctgtcagatcatcatcttgacttccattggctgcataagtaaaaactgcacctatacgaatcttgggattcagttccttgaatatcttgtaataacggataagcatcggtacggactgtacagcaaacaatgcatcgaactctccgtcaaatgttgacttattgaaattattaaggatgaatttagcgatttccgtcatgcgattagtactgccgttctgcacttcctcactgccatgataatactctacaaggaaaccgagaacattttcatcggcaatggcatctttaatcagatagcgatgcaggcagttgccgaatacctctttggtcgtatgcccatcaactgcattttctgtaaaaataggagttccggtaaaaccgaatatctgggcattatcgaagaattgcataatcttcttatgactctccccgaagtgactgcggtggcactcatcaaatatcatcacgatacgggagtggcatatcgaatctatcttgctgctgtaccatatcttacttacggcagcattgagtttctgaatagtggtaatgataatcttggagttactatgcagccgttttaccagttcatccgtattgtccgtaccgtcaacagctcccggttcaaaggcttcatattccgactgcgtttgtgtgtcaaggtcatgacggtcaacaacgaacattaccttatctacatcatccaactccgaaacaagctgtgctgttttgaatgaagtcaaggtttttcctgcgcctgtagtatgccagatataaccgttatcgttggagttctgtacccgatccaatatcttttctacagcataaaactggtatgggcgaagtaccatcaagcatttatccccttcatgcaatacgatatattttccgataatcttaccgagcgtacacttttccaagaaaaatacagcaaacttatccagttcattgaatggcagatttgccgcatccgtccagttgaacgtgaatttatatccaccattgggattattggcgaaataacgagtatttacgccattggagataacaaatagctgaatatagtcgaacagcccatgaaaggatgtcttatgatagcgttgtatctgattgtatgcctgcttgagttctacaccccgacgcttcaattcaatctgaaccagagggaggccattgataagaatcgtcacatcatagcgacacttctttcgtccctccaccgtaatctgattcgacacctgaaactcgttctgacaccattgtgtacgattaaggaattccacccaaatacgctgcccgttcatcgtgtcaagaggatataggtcacgaagtttcttagccttttcaaagcgagtaccaccttccagatatatcaatatcttctcaaactcttcatccgtaaatgagttacgaccaacttccgccagctgtttcttgttgtgaatttccaactgccgcttgaagttggcataaagattatcttcttcggtaatctggacatactcgtagtccatttgccgaagtgtggctataagtccggcttccaatgccgcttcgctctgtattgacatattctttccctactatggtgttattacttatttattccagcttgtagtattttgatacctaatgcattttctattttgcacaaagtttccaatgacagattctcgcgacctttcaacaccttggatacatattgctgggtgcagttcattttctcagccaacgctcgttgtgtcatgccaagttcctccattcggtttgacatggttgcagctatagcctgcgaatggcaaacccaatcttcgcttttgcattccactgtttcctcttttacttccagtgcgttgtctatcttatcttctgccattgtatgcatcaaaaatacctttgccttatttggtaagcaaaggtactataaataattgagatgacacaactttcaggttgttaatcggttcttttttgcgctaagaatattcttatttaattgctgttactcttaaatcatatctacggctacccgtgtcaagatcgacatcatactctttcagtcctttttcaactgcaatctgatgtaattcttgcttatccttttgtgatatatctggaccataatatattgctttcaagcatccaacatccggtattgcaacataatcattctcatcttctaaattatagtaaatcattctccattcatgttcgtactcgtattcttttctgtctttataaagataaactcgataccaatataattgattaacagatattatagacgacaaaaagcttaaccaatttttatctccaatctgcttgaaatattcgtaagtatgaatatttccctcatctaatgtaacatccggtcttaaatctgtataaatcacaggaaagagattaacactcattcccaatgaattatatttaaaaatgcatcgtctgagatcatattctaatgcaaaccccttatatccatctgcatatctatcccacatatacttagactgcacactttctgtaaaacaggcaatttttgcactatttcttggatttctaaaacgcgattcttgtttttttatcgcagcccctatattattgcaaaaatcaacataatcatctgtcaatattttatctataatttgttcatccgtatatccgcactctctataataacatattttcgttgctttttccgcccttatttcaggggatttctgtgttatatgcgacaatgttatgcgcaacgcatctttcaatgcattttttagatctttgtgaatcttatcttgatctatatataaatacgaatcatatttatctggaaacattcccgcatggcataatgaaatagttttagatttaaatgattcaattgtatagcccttatcgtctattctacgatacctaaaaagtttttccggtatattaggaagtactaacttataaatattactccatacgtcagaagtcgcagttttatctatattgaaagggatataagattgttctataatctcttggaattgttttctaaaatccaacatctgcaaatcacgaatttgttatttctttatttcattaactcgacaatattttctggcaacacggcgtttcttataccatctttcggagcattcttaaggaacagcattggaacgacggtgtagcacttggcaaacggtagcagattagctttgcggagaagttcggcagtcagttgtttgccattctcttgagtagtccatttgcattctccgaccaacaaatactttttgtcaagcgattcggccataacatcaaactcgacttgttccggcttcttatcctcattgagcacagaaccccaccagcgttttgccttgccataaaccactccattgacaagatttcctgttacggcatcccgacataatttttcccattgcatactcacatactccgataaatgagcagtcaaagcctgttctattggcaaacgacgaccaagctcgatgaacgaacgattaggtacgacaaactgataataaaatgccataaacggatcggctatcttgtaaagactctttttcgcattcttttcatcaatcccaaacggaacatctttctccaaaaatccgagatcaataagtttcttcaatggacgcgacaggttggttgcaggctcattgcatcttgcggcaatctcagaaagccgatttgcgccagtaccgatataagacattatcgtcgaagtcttaacaatatcctttacatcgtcctgaaacaattttatcggttcttcgtaaagagttccatttacagaaaggatattgtgccacaaagcatcattaagtgaattttggttttcccttagttcccaataacgcggtacacctccccaaacagcatattcttcaatggcattcatcgcatcaaggctcaaagcctcttgaatatatggcaaacgtatcggtgcaagtttcatgatctcatcagcacgaccatagagaggtgcagtagaatcaagaaacaatccatacatcatattttgtgacgaaccgcaaagcacaagattatacttcaacagcttttcatcaaccagtttttgtagcacagacggcagttcagaagattgctctacaagatacggaaactcatccaaacataaagtaaaacgcttgtctgttcgataattgaccgcacgaaacatagattcccaatccggatatgtcagtttgtcgaaatccgggaacacttgtgctattacttttgcaagcaatactctctgatgttgcccttcagaacggtcagcaaggaagtaaacatccgtatccgacaacacccttttgataagcgttgacttacccaaccgtctgcgaccgtacatcacgactaacgaggacttctctcttgcaagagcatcctttaatcgtgcagcttcatctattctatcaacgaatttcatatatcttatttattatgcagcgcaaacataatgcttttattgcataacacaaatttttgagccatatttttttattcccaaagagcaaattgcaacttatgtataggagaacatgtgctctattccttttttgaagctcttttccttgttttcaaactcaaatcttgcaaagcttttcccaacttgtcttctttggccagccatagaatatcatcgtcaagctgtaaagcatacagcactcgcaaatagattccgattgctactgtcggtgtgcctttttctattcgggacacagtcaacggagaacaagtggcacgttctgccacctgagccacactcagattcctgcgcaagcgagccagtttaatctgctctcccacaattgacatcttctgcaccaattttcggggcagcttagtccccattgtattctttgccatattcaacacatcatataatatgtaaatttataacttttcatctatttaatgatgtattacaggtaaaaaatcacaagattagaagaaacgcttgaccaagtacaatataacggttatacactttttcaagcgaataaatcagattcgttatactttttcaaacgaattctatgtttataaaagttgcagcagcttccgacaaccatcttggggaaagtgtgtaaaacaagataattttgctttggagaaatataaacgctattatattgtttataagcgccaatatatccacacaacaaacaatatgttatttgttgcgtaaacacatacgattcctccacacaacatatattcaagattagttggctattcaaatgaaaaacaactttactttatccccgtatttatatatacgtgcattaaagtaaagctaacagagggagaaaaagaaatgacttcgccaaagccgaaccgaactatatctgccgacttttttggagactgcaaaataatcacataatttgccaaatccctttgaccattatgtctcatttttgagtcgaaaacagttcattttagaaattccatcgtttatcattaaatgttatcgactaaaatcagtacctttgtataagaaatcacttagagtataaatgtggtaagaatttgattatcactcatttcatctctaacccataatacattcttcgtctcgcactgtaaatgattaatagttcttggctgagctaagtgattaaagtttagatagatgttactagtagttcaaatataatgtcaaagaagataggtcgtaatgagccttgcccttgtggcagcggcaagaaatataagcattgttgtatgcaaaaggaacaggcaataggaatattgccagtagcaaatcatgctttgtggccatcttcttggcttgatgtaccaaaaacgatagcgtatttaagtaatcatgcagtccctcccatattggactatttgatagcaatgcaacttaatccacaaaatcgagggaagaatatccgaattgagcaccttttgcaaatagcagttgcgaatctcggaaagagtagccagattcctgacatcagtgagttcaagagtataattgaccaagagttctcatttgatcttatggaagacatgccgattaacatgtttgccgaacctgtagtgttttatggaggcaattacacattctttcctggcatctcgacacatgcgacagaaattttccgttcaatgacagaagccatattcaataaaagaaatatatttacggaagctttccgtaatgaaatttatgatggagtactcttcatgcttgaactgagcaagcttttgtcaacccaagcagggataagtggcttagtacgcggaaatgagacccctcgcgagacgcttaacgaaccaaaaactagccaatcttttgttattaatttgccgacaatgacagaactcattcatcggaataggctgaatccaaatgttttgaaatcatttttgttagaagttaatgctactgatatactaacccaagatgcagaaaagaatccgttgttatacagaccaatcgttgagtttgacaataacttctactttgccggaatttccagtcaaggctgtgccattaacaactttatcttaaaaacagctctaaaacatcgttgtcttgaagaactagtaaaacagacccattatggtgtctggatgcgcatcgggcgttcctgtatagaacagctgcgctgggtacaaaattcaatggatgaaatacttgctcctgttgaaggctattacgaagatgtattccgcattgatgtcaactggcttgcatacgtgtgctatgctcatgatttagcccgtaatgtagccatagatggcaatgagagtttcaacaatcgagatctcagccaacatttacaaaaacgtattgataccatcagaaatgataaaaggtcgaaagatgaccatatcctgacgcttgttctgtattctacaatgggggagacatacagatttgccatgaaaaagcaaaatggaactgactattttcttcaattctctgcttatgatttcttacaactgatacagactgagaaatgggacagcttgagtcttgttcgttatgctcggtccaaagagaacgtatcatctctcgagactcctctgaatcaatctctcgatgtatatgctatatataagcattatggtgaaagtttctatatgacagacaacacaccatcagacatgctttatattgagccaaatgatggatgtgatctcatattcaaaagtaaagatcaactgtatttccacggaacgctgaagagattaaatggacagtatgcttatataccagtgatacgtgatctcgactatgcggcaatttttaagcctgtccattcaggtttcaatgccaagagttgtgaatcttatagtattcctgtgtgggtaagttgttatcaagaagaaaaacagggaataaatccatcctctatttccgatactgtaataacagctgttgcatactggatggatactttacaaccagccatagccgatatgatcagccaacgctatgagcactccgtagaaatagaacttgtcttcagtgaaaaggtcttggccgataaagggatacactatgatgacgacataaagcctacgcaaggaggaaatcttaacgtatccaagacagaaggcggagtttccgttacatttgatgatgattatatccattcttttatgggagctggcaatgagagtgagcgcaacatgatgcgttgtatcataaaaaaactcctggaaatagacgaagagactgcatgccaaattattgatactcgcatcccctttggtcaagcaaagatgattctgatgatggagcagtcactcaaccccctgtcaatacccttgtggctttatactcctatctatattcatgccgccaccagccaactactacaagacaaattcccacagtggatgaaggagaaaggtcatgatatagcaggtaaactcaatacaaaaactgaaaaagaagacttcctccacaaaggagtagatgtgctccttaatgaacttgataaacgcctatcatcatttgatacattgtggttgctgcgtatgctcatgcagaatcacgagacattggtttatcagcgagagcataacagagtcttacaacccgcacagattctttgttttggagaaaatgagtcaaaacgtaaagaattcttcgatacagaaagacgacttgctgatgctggaatatctacccgtgctatgatagaatatatagctgcgacacagtatcgtggcggtggtgttaaaccaggcaatgatgatgtagaaagcctgttagctatcatgaacgaagtgatatccattggtggtatatgtgacgccatacatttagatgtagctaatcataccattgagaaattaggctctggacgttatggtatctacgatgatgttttttccgacaatgtaggagagtttgcagcaacgcgcactattgagagtgtaaatgggcaaatcgaagatttcgagagtaagatggccaggatggcagtacgtccagatacaaaagaaaaaaacaaggatgcagaactcgaggagatagatgtggcattcttagaggattggggagtatcatattctaacatcttgcagttcctttatgtttgttacatcatagctatgaagcagcagaagtctgttattgagatggaagagtctcaactcatcaaagctatgcaggagcattgtacagaactaactgaagatttagcaaagaaatgtatcattcgcctttctttggataaacgggaaaactacctcactccgccagtaggattagcgggcaaggatatcttcccttggtcatacaatagggaattaagttatctgcgtcgcccagtgattcgttatcaatatgatgatggcacagttatgtgcatgtttgggttccgctcctgtattcaagccggcattcagctatctgacttgctttattctggtcgcttacgttatgtgggaaggaagatagaaaccttgcttggaaaatttgaggctataaaaggggctgcgttcaatgacgaggtacgctcttttttggcaaagataccaataatgcgagtatgggaacatgatgtcactatcaaatctggaggttattttgcggcagataaagattatggcgatattgatgtgatggcttatgatacatcacgtgatatactctacttgatagaatgtaagaataccaatccagccaagaatattaaggaaatgaaaaccgagatggatgaatatcttggtcgtggtgataatcccgagagagacaagaagagagctcttgttcttaaacatttgcgtcgtcatcgctgggtaacggagcatattaatgaagttgcgaaacacattggtgtagcagttacaccccgagtaaagtcaatgatgctgacagctacagtaataccaacatcctatctcaaaagagagaaaataccaatgtcaattctgaattaccctgaattaaagataaagggcgtgaatttactagattcgtgcaaagaaccagatttaagcgtacttgatatatgagacttttagaggtgctgatgcatcacgccttctaatttttacctactcctaaaggtagtatggagcaatcgctgacggtttatcatctctgcaatctgttcagttcgcattcccctattctggcttgccaaacagtagagtatagcctcttcaatcttcatattttcaataatttaaagtgtgcaaattttgcacaagttgttacaaaagtacggaaaaatacggcaacggaggctctctgaaaaagaatcatatctgaaaactttctcttttgactgcaaaagaatacgaaatcccgactaacaagcctgacaaaatttcatatatgaacttttatacatattttcgtcccccaaagaaacaaaattatggaaacatcaaaaacatacaatagaacaattaatttattagataagtacacaaagtttatcaagtctattgacaccgaggatattggcaacaatcttacactagataaattaatagaactaaaatcaatactgtccgatattaataacataatgacattaatatcgactcgttctattgcaacaaagttatcagatatattatcatttaaaaatgaagatagagaacggatatttaatgatattgataaacaaaagccaaacacaaatggattcgacataagaattgactctcctgtaaaaatattagtagaagtcaaatgcaattctctaatccgcaacaaaaaatttggtgctgcacaaatcaatgcaattcttgaagatgctagaaaattacggttagaatcatctcgacatataaaggcaagtaaaagtattcaagacacaaaagattatattaagataattgctattgtcaattttggcaataggtctgacaaagatttaacgtctcaactactgagagaaaccaagtgtaaagaatccactaattctgcaagaaaagaacgaatgaaagtgaaaaagtttttaagaccattatattcactatcgcaaatacatgaaataacagatctagaaaatgtttatctaacaattttacatataaatgatttaaaaaatgagttagagcgaatacgatgtgagtacagtttatcactcaagtaaaaatacaacatagctttactttatccctgtattcatatatacgtgcattaaagtaaagctaacagagggagaaaaagagatggctgcgccagaaccaagccgaaccataactgctgactttctcttttggctgcaaaagacacagaaatcctgctcacaaaacaaacatgattcgagcccttgtcaagccaccaaaagcccatccgaaaatccgtaaaattaccctctattttacagccacaatcggcgaaataatcaccgatatgccttatctttgcgaaacggagatttaagagcaaaagagagccattattctcttttccccttcgtttgaagacaaactaaggttaaaaacgttaaatcttcgattttcggcgaaaaaacaagtaaatttttgagcagtctatcttttaagccgtaaattattgataatcaattagcataatatgctgcatcggcaaatagccaaaaacaaaccgggaccgacatccgatcagaagatgccggtcccgctgctttatcgagcggacaaggaattggcctgacgcgccctaggcattctgcctgcgaaaatgcgacacacgtccatcgcctcttccggaagagagggtatcggggcggaatccggataagggtgcggcgcgactaccgccgcggcttcggaagacgccgagcaatcagcgtatcggccgcatagagaccgggacctgcggcgtacatcagcacgtaaaccgacagataggccagcgccagttcgcgcgccgcgaacggatcgccgccgtgtacggcgaagaaagccacgcacatcgtgaaaatcatcgggataagagccagccggtagaacaaccccgcgataaacccgacagaacagacgacttcgccgaagatcgccagcgcgagcgaaacaccgctgccgacacccagcggatcgggaaacgcggcggaaagcgcatcgaagttctgccacttggcgatgccgtgcgacatcagcagtcctccgaaaataatgcgggccgcgagcagcagccacgaattgccggcggtatagggtttgtccggaaacagaaatctcagtattgcatacataatcttggaaatttatgctctaatatcacaataaatgccggaatttccaacactccgccacacaatttcggacatccgcatgcgatatgccccggaccgcgcaacggcaaagggagcatgctccgatttttcgtatctttaccgcagcaatttacaacatcgccatgatccagcagaccgaattcacactacgcccccgcacccgcgggtttcacctcgtcacggacgaaatcacggccaacctgccgccgctgcccgacgccgggctggtgcatctcttcatcaaacacacctccgcaggtctttcgatcaacgaaaacgccgatcccgacgtccgcacggacctctcggccatcttcgaccggctggtccgcgagcgcgaatcctactacgtccacacgctcgaaggcgacgacgacatgccggcgcatgccaaatcgacgctcacgggcgtcgagctgacgatacccgtcacacagggccggctcaacctcggcacatggcagggcatctacctctgcgaattccgcaaccgcgcttcgggccgccgcatcgtcgccaccctaatcggatagtccggccgcaattcagaagacaagcggacgcgctggccgaaaaattgcaccttcccgaaacggatcaccaaacaagggaaagcaatgacgacagcgacaaaacacaagaccgcggaccggctcaccgccgaagagcggcacgaactgcccgactcggcattcgggattcccgaaacgcgcgaattcccgctcgtggacgccgagcacgtacgggccgccgaagcctacttccgctatgcgcccgacaacaaaaaggcggctctggcccggcgtatcctcgccaaggcggccgcatacggcgtaaacgtacagagtcaggtcatccgcagctgggccgaggagtaacgccgcgcggaacgccggaacgcgcgaaggccggagcacgaacgccccggccttcgctttccgcgaccgcccccgatccggattccggtccgcataccccgaaccgacgaaccgcatcgagcgtttccggcacaaaaaacggcggcggaaaccgattccgccgccgctgtcgtccggacaatcccggccggttactgagcatgcccgcgcgtcgtattatccgcagggcgtccgcaaccgtctatttatccgaggtcgcaatcaccagctcgcctttgcccagcgcatcgtgggacacgaaccaacccccgaccggatttccgccgcacgtgatgcccgtaatgcggcggcccgttccctcgcggcggatcgaccagcgggaaccgtcacccagcgacactgcgaccttgtcgaacaacggcacggtgacgatatattcgggatcggccggggaataggtgtaaagcccgattgcgttgaagacataccacgacgacatctcgccggcgtcgtccatgcccgacaacgccagtccttcgggtcccatgccgtagaatcggtccagaatgtggtcgagcagctcctgcgaacgctcctgacggccgatgaagtaatacaggtaggggaaactgtggtcgggctgattgccgtggcagtactgcccgataaaacccgaaaggttgtccacctcgtagcctttccacggaatcgagaagagcttgtccaactgcgctccgaacgcctcgcgactgggatagagaccgatcagcccctcggtgtcgtgcggcgcgaagaacgcctgctgccaggcgttggcttcgcggtacatatattcgtaatagggatactggtcgtcgaagggcgtgatccacgagccgtcgtcgagccgtccgcgcatcaggcccgtcgagggatcgaagaggtttttgtaattggacgtgcgcttcatcagcatgtcgcggttcgcccggtctcccagcgcatcggccagcagcgccacggcatagtcgtcgtaggcgtattcgagcgttttcgtaaccgcggctttgcatacggtctgcgtcacgggattctcgacatccatttcggggatatagccgcgggcgacatactcgtcgagccacgggcggctcggcccctgcacggtggcgttgcgcaggaccagctcgtaggcgcgccgcacgtcgaaaccgcggatgccgcgcaggtacactccggccacgaacgccgaagcgtggtcgccgtggaagaaggtcggcatgaatccgccctgtttttcaccccggtcggtgtccgagctgatgacgtcggccgcgacatcgggagccagcaggccgagcagaatcagcttgttgcggtaatcgtcccaatacgaaggcccggtgtaataacggaacccggtattgacgacctcgccgtccgcatcggtaaactcgccgttcacatcgctgcgcagcgcgggccagaggaacgagcggtaaaggcatgaatagaacaatcctttttcgcgctccgtacctccttcgacacggatccgccccagcagatcgttccatacagcggtcgcttcggagcgcacggcggcgaaactcctgccgagcatctcggcttcgagattcttccgggcgttctcctcgctcacgaacgagaacccgatccgcagttcgaccggaccgtcgccgtcgccgaagcggacgatgcggatttcacggtctccctccgcaaccggctcgatcccggtcacgggacggtcggccacggcatagaaatacatcttctcgcccgtctgctgccatccggcgaaggcgttgtcgccctccttacggatatcccatgcgcgaacatgttcgttcgaacgctgcaggtcggccagcagagccgcctgcgccccggcgggataggtgtatttatggaacgcgcagcgcagcgtcgaggtcagctcggcatcgacgccgtagcggtcgagaaaaacccggtagtaacccggagcggccgattcgcgcgcatggctgtagggcgaacaatagtctccgggaagcggcgtgcccgtgacgggcagcagcggaatatggcagaggttccaatgccccttgttggtgtgggtaaagccgtaaatcacgctatcctcatactggtagcccgccccgctgtggaatttggtgacggggctgacctgcaccatggcgttgggaagcgacgagccggggaagacttcggcgccccacgtacgtttggtgggcttgaagcccagatcgacgctgtcccagagcgtcgcggttcccagcaggggattcacatagtcggtaaggggtttctgcttcggcgcgcacccggcggccaaggcgaacaatacgatacaaagtccggttttcaacataagcggtgagaattcgtttcagacaaaattagcgcttttcatccggcacgtgcaacccctttcgggcaaaaaaactatctttgtcccgcaggcggactactcttgcacaaaaccggacacgacacatggagacactcacgcaatttctgatcgactggggctactggggccttttcttctcggcgctgatcgccggaagcgtcgtgccgttcagctccgaggccgtgatgctcgtactggtgcacatggggctggaccccgtgctgtgcgtcgtctccgcggcatcgggcaatacactgggcggcatgagctgttactggatcggcacgctcggcaagagcgaatggatcacgcggctgggcgtaaaggagaaacagctggacaaggcccgccggtttctcgcagggcgcggggcgatgatggccttcttctcgttcctgcccaccatcggcgaagccatcgccatcgtcctcggcctgatgcgcagcaacgtctggctcacgggcggctcgatgctcgccggcaagacactgcgttatatcgtcgtgctggcgactttccaaggcgccgcatcgcttctctaaatcctcaacgcatggaattcgaaatcgtaaaaaccgacactccggaccgcagcctgctgttgctggccgacgaatcggaagagtccgtggccgactacgccggccgcggcacgacctatgccgcatgccggagcgggcaaatcctcggccagtacgtattgctgcatacgcggcccttcacggccgaagtggtcaacatcgccgtcgcgcccgaataccagcgccgcggcatcgccacggcgttattgcagcatgccgtacgaacggcccgcgatgcggggttccgactgctcgaaatcggcacgggagacatcggcgcgggacagatcgccctgtacgaacggtgcggtttcgtccgctgcggcatcgacgaagactacttccggaagcactaccccgctccgattttcgaaaacggcgtagagtgccgccacatggtgcgcctgcgcatggagctgagataacggatcatgtcggtcggatggaacccgtggcacggatgccgcaagatcagcgaaggctgccgccactgctacgtataccggcaggacgaacggcacgacaaggacagcagcgaggtgcgtaaaacctcggcgttcaacctgcccgtgcgccggagccgcgacggacggttcaaggttcctgccggagagatggtctacacctgcttcacgtcggattttctggtcgaagaggccgacgcatggcgcgccgaggcgtgggagatgatccgcacgcgcagcgacctgcgcttcttcttcatcaccaaacgcatagaccgcctgatgcaggtcctgccgcccgactggggcgacggctacgagaatctgatcgtgggctgcacagtcgagaatcaggcggcggccgaccgccggcttccgctgttgctggaagcgcccctgcgccacaagctgatcgtctgcgcaccgctgctcggaccgctcgacatcgcgcaatacctcacctccgagatcgaggaggtctccgcgggcggcgaatcgggcaacgatgcccgtccgtgcgacttcgactgggtgctttcgatccgccggcagtgtctcgatgcggacattcccttctgctaccaccagacgggcgcacggctcgtcaaagacggccggctgtaccgcatccgccgccggttccagcacgcgcaggcccgcaaggcgggaatagactacaaggtaaaacgatagccgccccggtttcccggagcggcttgctcaatactacggcatgtgatgcggtcaggcgttgttcgcggccagcggcgaagcctgctggtatacgcgcgcggccagctccttgtcgagcgtataaagcccgaacttgttgccttcgacggcctcgcatgcggtgatcatgtcgcgggccgactcctcctcctcgacctgctcgtccacgaaccatacgagcatgttggccgaagcgaaatccttgtcttcggcggcgatcgacgcaaggttgttgatcatcgaagtcaccaccttctcatgctccagcgtatccttgaacatgtccagcggcgaagtccactcggtgcgcacttcggcgatcggcttcagctcgactttggcgtcgcgcgaattgatgtagttcatcaggatgcgggcgtggtcctgctcctcctgaaactgtacgaagaaccagttggcgacacccttcagccccttggcctcggcgtccatcgacatcgaaagatagagataggccgaccaaagctcggcattgatctgctcgttcagagcgtcatgtaatttcttgcttaacatagctgtattgttttaagtttgtgttattctttcctgatacaaatatacaatagttttcgccgatttgtacggaaatcccatcacattattttataacacaatagtccccggttataacaaaaaagacggaaccttcgccgtgaagattccgtccctgccggggtatgccgtcagaaaatcgtgccgtcggcctgaatgcgcagttccgcttcgcggtccgactgcgggtcctccagttcgaagagataccactggcgttcagggctgtcgtaatggtctatgtcgtcgatctcccagcccgcgtactgcgatgtctgaaacgcctgcatcaccgctgcggggacctcgctcctgcgcacttcggttttggtccggagccaagcgtcgccggcgccgaaataaacctcgcgcggcgtacggccgtcgataatttcgacttcgagtccgcctttttcacgctccgcatcgacgatgcgggcgcccggatatttccgtccgataaaatccttcacagcctgcggaagctcctgcggaagcatatccccgtggtcgcggtcaccgtccgcatcgggcacggcgcgcagcaacacgccgtcttccgaatagacaagctcatactcagcgtcgcgctgctcgacttcgagcacatagaccgtctccaatccttcgcgcgtcagcttatccgcgtcgtccacatgccatgcggcgtactcgccgctttcgaaagcggtgcgcaccgcctgcggcagcagggcgtaaggtacgtcctcttcggtcatgtaccatttgcccgcggcgtcgaaccacgcctgcatgtcggttccgccttcacggaattcggcgaccagatagccctgcttccccgcccattcgacatgtcccgcaccggggaacatccgtccgaacgtatcctgcactgcggccggaaccttcaccgaatcgtcgtcgtcatcgcagcccgtcatcgcacccagcgacgcgagggccagcatcaacactgcgaactttttcataatacctcgcataaagggctgtccactaattgtcgatatcgatcagacggaacttgaggtcgaacttcaggtcgagtccgttgtccagctccacctcgtaatcgcggcggtcgcggtcgatggcgacgatcttgtttttggggtaattcttggtcacataatcgcggatctgctgcggaacgattgccgccggcacctcgccgtatttgcattcgacgtccttccactcgccgttcttggcgaattcgactttggcgccgtttacgaatacgaccttgtaatccttgtcgaaaagctcctcgtccaccttcgagaaggagacttcgacgcctgcgaagtgggttttgataaactcctgcgacacggccggaagttcgccgacggcgatcggacggtcgttgcctgcgaaggcgggagcggaagttgcgagcagggctgcgcctgcgagaatcatcatgagctttttcataatcgttttgctattttggttcaacattgcttatcgtttacaatgcaaagttgcgacctaaagttgaaacgaatttgaaataaacgccccgatacgcttttttttgatttttatttcggaaaatgcaccgtgaaacagtggcacctatttatatacgcatattcggtccgcaaaccgtaaagacggcacacggcatcgacgatcgaaaggcccagccccgtcgaaccctcctttttggccccctgataaaagcgttcgaagatatggtccgcatcgagcgcaccgcccgcaccgctgttgcagacgctcagacgatccccggaaacggtcaccgtcacttcgccgcccgcatctccgtggacataggcgtttttcagcaggttcgtgaccaaactggcccccagcgacgaattcatgcgggccgcaagccggccctcttcgcgcagggagaggcgcatgccccgcccggcgtaaatctcagacatatcttcggccgtacgcctgaccagcgcattgaaatcgacctgctccgtttcggggaactggccgttctcgatcttcgacagcaacaacagcgaacggttgagccgcaccagataatcgagcgtccgctgcaccttcataatctcgcccaactgctcctcgctcaacgccgagccgtcgcctacgagcatctccagccggttgcggcaaaccgccagcggcgtctgcatttcgtgcgacgcattgccgatgaactgcttctggcggtcgaacagcacttcggcccgctcggcattgcggatcgccgcctcgttcagccgccggaattcggcgatcttcgtatcgttggccagcggagcgttctttccgcctaccctgtagccgtcgagccacctcagcagggcatacaggggccgcagggtgcggtggagcaccagtatgttgatcagcagaatggtcagcagcaggaaaagatacagatagacgatccaccagagaatcgcctcctgcaaatcgtccttctcgatggtcggcgtcatcacggtaagctccttatagcttccctcccggtcgcggaagatcatccgcagcacgcgcgccggctcctcctcgtccttctccggaatgaaaatctcctcgtcgctgtaaaccatatggggccgtgcggcggcgtattcagccgagacgtcgtgcaggaaatagccgttgttgctgcccgaaaacgccgcaggaagctcacggcccgcaagattgcgtttcacaagcacctcggcatagttttcgagcgaatcgtcgacttcgtcgttgatctcgtcgatcatcgtgaaatagaaaagcaccgcccacgccgccagcagcagcgagagcgcccaagacatatggagcaggatacggtaaacgagtttcatggcgtaacgagtttatagccgaagccgtaaacggcgcggatttcgatgtccgcttgcgcgtcgtgcagccggcggcgcaggtttttcatctgggcgtagacgaaatcgaaattgtcggcttggtcgatgtggtcgccccacacggcttcggccagcgtcgtcttgtcgatcatatggttcgggcggctcatgaaataatagagtatatcgtactccttgcgcagcagttcgacctcccggcccgcgatttccacccggcggctgtcgggaaacagccgcacgtttccggcatcgagactctcctgaccgccgcgctggtggcggcgcacgacgctccggatacgggcgctcagttccgcgaggtggaagggtttgggcaggtagtcgtcggcccccagttcgaggccctcgatcttgtcgtcgagcgagtcgcgggccgaaatgatgatgattcccgcctgcctgcgctgccgcttcagctcttcgagcagttgcaggccgctcccgtcgggcagcatgatgtccagcaggatgcagtcgtaatcgtatccggcgatcttgtcgagcgccgacgcataatcggcggcctgctcgaccacatactgttcccggcgcagggtctgcaccatgatctcccgcagggagggttcgtcttcgacaatcagaattttcataaccgcattttttccggatgcaaaactaatgcgcgaatccgaaaagaaactgaaaccgcacatgttccgcgaaagccaaatatacgaaaattcccggttccccgaaacgcaaggcgccccggaatatgcagaaaagagacggaaaccatcactggtttccgtctctctgtagtctatttcttcggcgggcatccgcccgcaccggaaaactatttctccgaagaatcgatctggcaggctttcgaaccgtcgtaagcccacttcacatagatcgcgccccacgtataaccgccgccgaaagccgacagaatcaggttgtcgcccttgcgcagctctttctcgtaatcgtaaagacacgaaggaatcgtcgcggcggtcgtgttgccgttgcggtcgatgttgatcatgcacttctcatgttcgagtcccatgcggcgcgccgtggcgtcgatgatgcgcaggttggcctgatggggcaccagataacgcacatccgcagaggtaagtccgttgcgctccatgatctcgaccgacacgtcggccatcttcgaaacggcggccttgaacacggcgtgtccgtcccacatgatcgtatgccaattgttctgcacggtctcgaccgaagccggatagcgcgaaccgcccgccttcatgtagagctgcagctcgcccgaaccgtccgaacggagaatctcgtccagaacgccgtatccctcttcattgggttccagcagtacggcggcggcgccgtcgccgaagatcggacaggtggaacggtcggtgtagtccacgatcgacgacatcttgtcggcgccgacgaccacgaccttcttgcacgaacccgactcgatgaatttcgcacccgtcgtaagggcgaaaaggaagccgctgcacgccgccgaaacgtcgtatgcaaaggcgttcttgcatcccgcctgatcggcgatcaggttgcccgtcgaggggaaaaacatatcgggagtcaccgtagcgcaaatcaccagatcgatctccatcgggtccacccccgctttgtctagaaggttgatgaccgcgcgggcgcccatgtaggaggaacctacgccctcacccttgaggatatggcgcgtcttgacgccgatatgcgacatgatccattcgtcggacgtatcgaccatggtgctcaactcttcattcgtaaggatgtaatccggcagatactcacctacacccgttatcgctgctgttattttacccattaactttctctcctaaattgtgtgattaatttttgaaagcatgctgcagtttgacggtaaggtccgccttgatgcactgctccgtcgaaaggatcatgcttttgatcgcgcgggccgacgagatgccgtggccgatgattacgggcgcattgacgccgagcacgggcgtaccgcccacgttttcgtaattcatcgcgtcccagaacgcattgccgccgcccagcttcttgttgatgcggtaaagcccctcggccatcttcagcaccgtattgcccacgaaaccgtcgcagacgatcacgtcggcgacttggcccgtaaagatgtacgaaccttcgacattgcccacgaaattgatgcgtccgtcctccttcagcagttcgtaggtcgccttggtctgggcgttgcccttggtctcctcctcgccgatgttgagtacggcgacgcggggtttcccgattccgagcacggcttcggcgtagatcgaacctatcagtccgtactgcgccagcacttcgggcttgcagtccacgttcagccccacgtccagcagaagcgcgggacgccccgcaatcgtgggaacgatggacgagatcgcgggacggatgaccccttcgatcggttttaccgcatacatcgagccgaccatcatggcgcccgtactgccggcgctggcaaaaccgtcgatggcgcctttggccagatagccgaaacctaccgtaatgctcgaatcggccttggcctgaaaggccttggcgggatggtctcccatctcgatgacctccgtggtcgcaacgatgtcgaagcgctccgcggagcagccctcggcttcgagtacggctttgattttcgcttcgtcgccgaacaatacgatgcggctgtccggcccgatcgcttcaagtgccaatacggcgccctgaaccgccgcctcaggagcgaaatcgccgcccatggcatctacaccaatctttaacataatcgtgcgatttggtttaacttcatatcccgctctgtacccgtcggcaggcccgcatcacggaccgtccggccgtacgcggcgaagacagggagcttctgtaaactaaaaagagagcagcctcgcggatgcactcttcttgccgtctgatttattcagcagcttttttctcgatcgccagctttccgcgatagaaaccgcactcagggcatacacggtggtacagcgtggctgcgccgcagttcgagcaggtaactaccgtcggaacgacagccttgtagtgggttcttctcttatcgcgtcgcgtcgacgagactttgtgtttaggatgtgccattttacaatataaattataagtttaacgtattatcgattctccttattgccgccggcgctatttttccggcgttcggtcctcttcctgcggctcttgggcctccatccgctccttgagcgcggccagcttggcccattcgccgccgtcgtgctcctgcgctccggcccgcgcctcgacggccgcgagttccgagtcggatacgatgcggaagcgttcgagcatctccggattgcactccccttcgggatgcacccgctggtaaggcagcgacagcacgatgctctcgtaaatgtactgcttcaggtcgatttcgtcttccatgggcagcaaccacatcacctcgccgtcgtattcgtgcacctcgtcggagaacttcaccagcagccgtccctgataatgcacgggaatccggcactcttccagacagcggtcgcactccacgacgacgcttccgtccaccgtaacgtcgagcgtaagcatcgcttcgccgcgctccaaggcgaccgtcacttcgcatgctccgtccttgatctccggactttcgaactcctcgaacagcgagccgtcgacctcgaaacgaaagtcatgcaaaccgggtttcagccctttgtaagcaatcgtataccttttagttacccccatacgagcgcatttagggcacaaagttacgaaaaaataagacatttgcaaagaaatcgctcagttttagcaccccgcgctccagacgcccgtccggcaaaccgtctgcggcggggcggagcgattttcccggcacgaaattcgccgaagagcgaaaaatcgctatatttgcaccgtatggcagcaactgaaggattctcgatcgaaatatcaagccgttacgacggctggtggcgttacaacgcagcgctgatgtgcggctgcttcgacgccggcgacgaacgcatcggattcgcctcggccgaatcgcacgtcgcggacgtcggcgcgaacctgacggcaaaacccgcggacatgacgggcgaccgcagcctgcggctcgaaaccgctgcgtgcgaccacctgctgctctatatttatattgtaccccacacgctgcccgcaggcaacgacatcgccgacacgcagccgttcgaaatcaccctccgcatcgcatacggcggcaaagtgctccgcagcgaaaaacgccttatcaaccagtggtcgggcgcatcggtcgagatgcgggtggatcgtcaggacaaataacaataaacgacaaaaaaagagggatccggtttcccgaatccctccgctttatgcgtcggcttacgactatttgttgttgtaagcggccatcttttggatcagcatgactaccttgttcgagtagccccactcgttgtcgtaccaagccacgagcttcacgaagttcgggttcagcgcgataccggccttagcgtcgaagatcgaagtgttggcgtcgcccgtgaagtcggtcgaaaccacgtcgtcctcggtgtactcgatgatgcctttgaactcgttctccgaagccttcttcatggcagccttgatctcgtcgtacgaagcgcccttctccagacggcaggtcaggtctacgaccgaaacgtcgagcgtcggaacgcggaatgccataccggtcagtttgccgttcagggcggggatcaccttgcctacggcctttgcagcgccggtcgacgaggggatgatgttgccgccggcagcacggccgccgcgccagtctttcatcgagggaccgtctacggtcttctgcgttgcggtggtagcgtgtacggtggtcatgagaccctcgacgataccgaagttgtcgttgatgaccttagccagcggagcgaggcagttcgtggtgcacgatgcgttcgaaacgatctgctgacctgcgtaagtatcggtgttcacgccgcatacgaacatcggggtgtcgtccttcgagggagccgacataacgacgtatttggcaccggctgcgatgtgggcctcagccttctccttggtgaggaacagaccggtagactcgacgatgtactcggcgcctacttcgttccacttcaggtttgcgggatccttctcggcggttacgcggatgacgttgccgttgacgatgagctggcccttctccacgttgtagtcgatcgtaccgttgaaacggccgtgtaccgagtcgtacttgagcatgtaagccatgtagtctaccggaacgaggtcgttgatacctaccacctcaatgtctgcattgttgcacgcagcacggaataccagacggccgatacgaccgaaaccgttgatacctactttgatctttgacataatgttatgatttatttgttaataaaaaatgcgttattttttcactgcacaaaagtacatactttatgtatattacgcaagtaaaaaattaaatttttttagtaatccgattcctgcctacttcgccgccctcttggcccgtttggccatcgccgaagcgaagacgaagtcgttgagttcggggttgtcggcgtgcaggatatcgtctttggtgccctcccaccatttgcgaccttcgtgtatgtatacaattttctcgccgatttccatcaccgagttcatatcgtgcgtattgatgatggtggtgatattgtattcgcacgtgatttcgtgaatcaggttgtcgatgacgatcgaagtctgcgggtcgagtcccgaattgggttcgtcgcagaagaggtagcgcggattgagcacgatggcgcgggcgatggccacgcgcttgatcatgccacccgacagttcggccggatagaggtggttggcctcttccagccgcacccgctgaaggcagaaactcacacgctccatcttctccttctcgctctgcgaggtgaagaggtccagcggcagtttgacgttctcctcgacggtcgaggagtccagcagcgccccgccctgaaagatcatgccgatatccttgcggatggcgcgccgctgcttgaaatccagctgcgtgaagttggtgtcgtcgtaccagacgtcgcccgaatcgggttcatggagtcccaccagcgtcttcagcagcacggtcttgcccgaaccgctgcggccgatgatcaggttggtccgtccggtctcgaattcgatcgaaatatcgtcgagcaccacgcgaccgtcgaacgatttggtgatatgttcggcgcgtatcatatgagcaggacttgcgtcagtataaggttaaagatcatgatcactacggagctgaccaccacggcgcgcgtcgaggcggcgcccacttcgagcgaattgcccttggcgtaatagccgtagaaggccgaaatcgaggtgatgatataggcgaagacggcggtcttgatcagcgaatagacgatcgaatagggcttgaaatccatcagcaggccgtcgatgtagtcggccgggatcatgatgccggtcaggtaggcgatcgcccagccgcccataatgccgatcgcgatgctcaggatggtcagaaacgggaagaaaaccaccgcggcgacgatcttcggcaggatcaggtacgacgcggagttgacgcccatgatctccagcgcgtcgatctgttcggtgatgcgcatggtgccgatctccgaggcgatgctcgacccgaccttgccggccagaatcagcgccacgaccgtcgatgaaaattcgaggatcatcgtctcgcgcgtggcgtagcccaccagcgagcgggggatgaagggcgaatcgaggttgatgcacatctgcagggtgatgaccgcgccgatgaataccgagatgatcgcggtcaggccgatcgagtcgatgcccagcgactccatttcgtaaacgatgcggcggcggtagatggcggccttctccggacgggaaaagactttccccatcaggatgaaatagcggcctatcagctcgaatatcttcagcatacgctactcttgtttcggctctttcgtctcttcgaactcgacgtagtcgccgacgtctttcgacacccgtttttcgggcgccccggaggttttgcgcaccttcacttcgccttcgcggcccttgcgggactcgccggcaaagggcgagccgaaaccctgtccgccgaaattgcgcggatcgaagccttcgccgaactgctcctccatctggcggcggaccttgttcatccgccagcggaacaccagtatcagcgccacggccaatatcagaatactcataacgacatacagaaaaaacagtgcgacgcccttcagcagcgccggagcggcgatggcgaggatgagaatgaccaaaaccgtcagcggattgcgctgcacgaatcccaccagagcgtttatgattgcggtcagaaaattcattgcaatttaaagtttacaaccttacaaaggtagggaaaaatatgcggatttcaattaattgtcgtaaatttggtgccggaaaacaaatcacaacacaatatgctcaacaaacttacagccatttcgcccgtagacggccgctaccgtaatacaacggaaacgctcgccgattatttttcggaacaggccctcatccgctaccgcatccgcgtcgaagtggaatacttcatcgcgctctgcgagattcccctgccccagctggccggcatcgatcgtaccaaattcgccgccctgcgcgccctatacctcgatttctcgcccgccgacgccgagcgcgtcaagcagatcgagtcggtcaccaaccacgacgtcaaagccatcgagtacatcatcaaggaaaaaatggacacgctcggactggaagcctacaaggaattcgttcacttcgggcttacctcgcaggacatcaacaacacggccattccgctctcgctgaaggaggcgatggcgggtttctactaccccgccgtcgaagaggtgcgcgacaaactggcggcttttgccgacgagtggcatgacgtgccgatgctggcgcgcacgcacggccagcccgcatctcccacgacgctgggcaaggagttcatggttttcgtcgagcgcatcgagaagcagctggccatgctgcacgacatcgccgttccggccaagttcggcggcgcgaccggcaacttcaacgcacaccgtgcggcctatccgcagtacgactgggtggctttcgccaacaggttcgtcggcgagacgctggggctctgccgctcgcagtacaccacgcagatcgaacattacgacaacttggccgcgatcttcgacaacatgaagcgcatcgacaccatcctcatcgacctctgccgcgacatgtggacctatatttcgatggagtacttcaaacagcagatcaaggccggcgaggtcggatcgagcgccatgccgcacaaagtcaatccgatcgacttcgagaacgccgagggcaacttcggcatcgccaacgcccttttcgaacacctctcgtcgaagctccccgtctcgcgcctccagcgcgacctcaccgactcgaccgtgctgcgcaacatcggcgttccggtggcccacgccgccattgcgctgcgatcgctgatgaagggactcaacaaggtgatcctcaaccgcgaagcgctcgaccgcgatctggaaaacaactgggccgtggtggccgaaggcatccagaccattctgcgccgcgagggctaccccaagccctacgaggcgctcaaggccctgacccgcaccaacgcccacatcacccacgagtcgatcgccgcattcatcgagacgctcgacgtggccgaaacggtcaaggaggagctgcgcgcactcgccccctcgacctacacgggcgtattccgctaagacggaaggatactccatacggcagacaagtcccggtcgtggggaccgggacttgtttttggcacgggctttgcgattcagacaatcaactgcggaacagcaaccgcagtgaggtttcttcatttatttaagtttgggttagtagttttaggagggcaatcctccgcaggcagcaggcaatcgtgagattccctgctgttttgtcatatattgcgcccggttccgctccgacccgttcattttgccgttttatccggccctgcggcgacttaagcggaaaaatatttggatttatttgcaggaaaccttacttttagcccgtcacttgccgcagaacggatcttcccgcaggtcccgactgcacccgaacaaaaactgttattaatcactaatcccaaaaatcacatctatgattaaatcgattctttcgtggagcactgcgctgctggtgctatgctccggtcttctggcctcgtgcgacgacaaagacgagggggggggaaatcctcctgctccggccgtcacgctggctgtcggtgacgccgcctccaacacgctgaaattcacgctcaccctgagcgacgcggacaaatgcacctatgtctgcaccaaatcctccgaagccgttccctcggccgagaaaattctcgccgacggcaaatccgtaaccgcatcgggtctcatcacgatcggcgacctcgaacccagcaccacttaccgcctttcggcagtcgcctccaacggcaaggtcaacggcaaggtcgaaaccatcgaacacaccacctccgcccccgacgtacacccggccgtcgttctgacgcccggcacgcccacttcgacgaccctttcgttcaccgcggccctgaccgaccccgaaacggccgcatacgtctgtctcgaaaagaccgaagggacgaccgttcccacggccgaagagattctccgcgacggcaccgccatcgcccagacgggtgagctcctcgtcgagaacctgaaacccgccaccgtctacctcatcgcggcggcagtcgccaacaccggcgtctattcggaggtcgaaaccctcgaaatggagaccgtcgcccggacgcccgtcgtcacggtcatcgcaggcactccgaccgaaacgaccctctcgttccatttcaaactgaccgatgcggagaaagccgcatacgtctgcatcgaggaaaccgacaacccgacgattccttcggccgaggagattctccgcgacggcaccgacctgcccgtatcggcagatgcagcggagatccgggagctgaaacccggcacgacctatatcgtcgccgtcgccgcgtcgaataaaacagtatactccgacgtcaagacggtcgagatgaccaccgaccaagccgtcgaaggcccgatcgtgttcgaccggcaggctgcaggcggatactatcccaccgagagcagctacatcggtgaattcctcttggtgctcgccgacggcgaaaccaccgaatccgggggcgtctacgccaccaccggcgcaggccgtgccatgagcatcgacctctaccagatggcggtaagcaatcccaatacgacgatcaccctgccggcccgcgactacaggtacgccaccaacaagggcctgacgacgttcgaccccgtgaaaacctactgtatggtcaacgacggcaaaggcaatatcacccgaaccgacttcaaggcaggtacgatctccgtcaagaaggccggctcgacctatacgatcaccgcgacgctgaccacgaccgacgacgaggagttcacgaccagctacgagggtccgctgacgatcgaaaacaagacctccaccgaaatccccgatctccccactctcgacaaggacgtaacgaatctctccttcatccgcgcgctgggcaaatattacagcgattccgacacggcagaccaatgtatcgtaaatctttacgacgtcgagccgacaatctcctacggttccgattacctcggacaggcaggacatctggtatcgctcgatctctcgaccgccgtttcgacggaaatgcagttgcaggagggaacctacaacgtctccgcatcgggcacgccgggttcttacgaagccggccgccaaacggagttcatggatacgaaactccccgtaggcacctactgcgaagagcgtaacgacaatttccagtcgttctacggattcgtcgcgtccggtaccgtaacgatcaccaaatcgggcagcggttaccgcttcgtactcgacttcaccaccgacaaggggcacaaggtcagcggcacctacgaaggcaacgtggagatgaccgacaaacgatgatgataaggcccggcattcgggccatgccgaaaacggaaacgggcaggatgtcttcgcgggcatcctgcccctcgtttgtgcccgtcccgttcgcaggtctgtcagtttgcagcccggccaattcatgtcccggcccgcaggcgtcacacgacccgcccccgcgaaccgcataggcgcccttccggcacggcggtccggcacgggttttgcaatataccctgtcaactgcggcacagcaaccgcagtgaggtttcttcatttatttaagtttgggttagtagtttcaggagggcaatcctccggaaggcagcaggcaatcgtgagattccctgctgtttttgtgtgttttcgcctgcaaaacgcccgcacgaatcacgcacccgtccgaaacgacattccgcccgtctggttacggcacggaaactgattggccgtcaggtgtaaaccacaattccacattatggcaaaaaacagaaacatcacaacaacgcagctcgcgctgatgaccgcggcggctgtcatcagtctgcgcgggcttccgatgatggcgcaggaggaacttaccatgttcttctacatcttcttcgccaccttcctgttcctgatcccggcggcgctggtaggcgccgagctgggcagcgccttcgcctcgaaaggcggcggcgtctacacatgggtcaaagaggccttcaacaaacacatgggcttcacggccatcttcctgcaatggatacagaacgtcgtctggtatcccaccgtactcggcttcgccgcggcgtcgatcgcctacatgatcggcatgcccgacctcgcccagaacggacttttcgtcgggctgttttcgatcgccatgtactggtgcgccacgcttgtcaccctgcgcggcacctcggccatatcgggcatcacgagcaagggattcctcatcggcacggtgttacccggcatcgtcgtgatcgtcatggcggtcgtctggatgatcggcggcaactccgtcgcgctggagcatattccggacaccgtcagtcaggtcgtcaatatcgacgccgcgcaccacgtccatccgcggctgttcccccacattacgggcatgagcgacatcgccttcctcgcgggcatcctgctgctgttcgccggcgtcgaggtgcacgccgtgcacgcccccgaactcaaaaagccgcagacgcagtttccgcgcgccatgtttctcgcggcgctcatctcgttcgggcttttcacgctgggcgcgctggccgtggcgatcatcacgccctatgaccagatcaacctccagtcgggactgttcaccacgttccagatcgtcttcgaacactaccatgtgggctggctcacgaacgtcatgggactgctcgtagcgttcggcgcactggccggagtcatgtcgtggatttcaggccccagccgcggcctgctatggacggcgcaggagggcgtgctgccctgcttcctgcagaagaccaacaagaacggcgtgcagatcaacattctcatcatccaaggctgcatcgtcaccctgctgtcgtcgctctatatcgtcatgaacgacgtgagcgtggcgttcttcctgctgagcgccctgaccgtgggtctctatctgctgatgtatatgatgatgtacgccgcgggcatccgcctgcgctacacgcagcccgacctgatacgcagctaccgcataccgggcggcaatgcgggcatgtggctggtcggcggcatcggattcctcgcggtgctcttctcgttcatcgtcaccttcttcccgccctcgcagctgcccgtcggcagtcccgccatgtatacgtggctggtagtcgtcggcacggcggtcttcctctccatcccgttcgtcatcagtttcgtcatggaccgcagggccgccggcgccgcgaacaagccctccggccgataaccgcagcggaaccgccggaaccggcacgtctgtcgaaaatccaccttacgcttcttctcccgtcccgccgaatatgccgcggacgggagaagaagctatttgcatgccgcagaaggcggtcggacaccgtgcggaccgcaacgaagcccccgcaaaggtagtttttcaccggctcggcacattcttccggaatataatatttttttattccgtttttttttaattttgtgtgagactatgactccggaaaaagaaaaagaactgctgaccgctctgtccaaagggaaccaatccgcattcgattccctctacctgttttatgctcccaaggtcagggaattcgtgttccggctgcttaaaaaccccggcgaagcggaagacgtcacgcaaaacatcttcctgcgcgtctgggagaagcgccgcgaactgggcggcacacgctcgctgcggagctacctctacacgatggcccgcaacgccgtattcgacatcttttcccactcgatcgtagaagacaaatacatgcaggagcatatcaactcggccgccgagcggcgcgacgctccgctcagcgagaaaatcgagaccgaggagctggcgctgctcatcgccgtcgccgtggaccgcatgcccgaacagcgccgccgggttttcagcctgagccgttacgaagagctttccaacaaggagatcgccgagcggctcaacctcagcgtcaaaaccgtcgaacgccacatgaccgccgccctgagccagctccgccggctgctgacgctcctcgccctcttcgtctgaaaacgcgccccgaaaacgcccgtccgaaggcgccttccgaaaaaatacgaaaaaaatcgctgccgggtgggggttgcgccccgccatgccgtcttatttataaaagcatatcccggataaagaccgcatacgatggagagacgacaaataagagagctcatcggcagattcctgcacaacgacgtccccggcgaactccagacgcaattccgccgctggatgctccagcccggcgacggcgacgaaaaagaagccgcgctgcgcgaggagtggaccgccgtcgtggaaagccctgcggcggccgaccgcagtgaagagctgcagcggctccgtcacaccatccgcatgcgtgaagcgcagcagcggcgcagccgcattttccgccgcatacgctacgccgcggccgcagccgccgtgctgctgtttgccgtcggcgaatattactacgtacgctcggcgtcggccgttccggccgaaatccgcctgctgacggcgcgcgggagcaaaggcgaattccagctgcccgacggcacgaaggtatggctcaacgcatcgagccgcctgacctatcccgaaacattcgaccgcagggaacgccgcgtgacgctcgaaggcgaagcctatttcgaagtggcgcgcaacacgtcgcaccccttcgtcgtcgatatgaaccgcatggagatcgaagtgctcggcaccacgttcgacgcccgctacgagcgcaccagcggcatcgccgaaacgacgctcaacagcggctctatctgcgtccgcacgtcgcgctcccggcaggccgtgcggctccggcccgacgaacggctggtcttcaacgagaccaccggaagcatgatcatcgaacaggtgaacgcctcgaactacaacagctggatacagcccaccctgaccttcttcgacatgacgctcgaagacatcatcaccaacctcgaacgctggttcaacgttccgatcggcaccgacgcctcggtggaccgcaccatctgtctgtcgttccacgtacgccacgaatcgctcgaagagaccctgcaggtcatctcgctcatcacgggactgcaatacacgctcgacggcgagtcggccacgttccacaccgcacgaaccaccagatcaagataacctgaaaaaaccgaaaagcctatgggaattcctcctccgtgatccacgaaaaaaagcggatgctgcaacatccgctccgacttaaaaccccgacgtgcttcgtaatgtaaccgaattacgaaatgacagaaccttaaatcgttacaaaattatgaaaaaatccggaaaatccggcggaaaagggattattccacttccgcccggaagattctttttgctgacgctgttattcacgctgctggccgcagccagcgtccgggcccagaacccgcccgtgagcatcaacgcaaaggcaatcacaatcaacgaattattcacccgcatcgagaaacagggcgtctataccttcgcctacaacaatgccgacatcgacctcaagcgcgtcgtgaccgtgcacgccaaggaacgtcccatcgaatccatcgtccgcgaatgcctgcccgaagtcaacgtgcaggtttccaacaacaaggtgatcctgacggcccgccgcagcgaccagagttcgatgccaatgcacaagctgacgggcaccgtgaccgacgaaaacggcgcgccggtgacgggcgccacggtgatcgtcgtcggcacgcagcgcggcacgaccacctcggcgacgggcgcctatacgctgcaggtccgcaacggcgaaatcctcgaattccagtatctcggctatgaaaagcaggccgtctcggtcggcgggcagaccacgctcgacgtcacgctccagccttcgaaggcgatggccgtggacgaagtggtcgtcatcggctacggaacggtgaagaagggcgacgccacgggttcggtggccaacatcaaaatctccgacgtaaaggacctcccggtgctgtccgtcgaccaagcgctgcagggccgcgtcgccggcgccgacatcatgtccaccacgggcgaaccgggcgccacgacttcgatccgcatccgcggtacgcgctcgatttcggcctcgaacgagccgctgatcgtggtggacggcgtgatggacgccgtcagcgacctcaacgacctgaacatggccgacatcgaatcggtcacgatcctcaaggacgcctcctcgacggcgatctacggatcacgcggctccaacggcgtaatcatcgtgaccaccaagggggggggtaaccagaccaacaccaaaccttcgatcacgctcaaggccgacatcggattctcgcagctgccccgcaagctcgacgtgatgaacgccacggaattcgcactctaccgcaacgacttcgcctacttcagcacccagagcggctacgaggacatcggcgagggcacgccccagtcgaaatatcccttcaaagaccccttctcgctgggcaaaggcaccgactggatcgacgaaatcacccgcacggcgccctaccagaactattcgctctcgatttcgggccgctcgaaaaagagcagctactacgcctcgctgggttacaacgattcgcagggtatcatcgacaacagcggtctgcagcgcatcacggggcgtctgaatctcgaccaccagctgttcaaatggctgaaggtcggctaccgcggcagctacacatggcgcgacaacgcccagaacctcgccgaaatcggcggcacggcctactaccgcgcagccatgtatctttcgccccacatcgacccgcaggagaactacaacccgctttggggcaacggccagcgtatcaatacgccgcgtgcgacgatcgaccagaacacctactccatcgagcggacctcgctcaaccacacggcctatctcgaagtggcgctggccaaaggcctgaagctgcgcagccagaactcctactattcgttccagcgccacacctaccgctactatccgggatcgcttcccgccaagaacgagggtgaaggcggtcaggcctaccgcgccgaattccacgaattcagcctttcgagcgaaaacaccctcagctacaagctcgaaaccaaaagcggccacaacatcgacgcgctggccggtttcaccgcctaccgctacaagagcgacaacttcacgctgagcggacagggctacatggacgacgacgtgctgtggaacaacatgaacgccgtgaccgacaaggagacctattcggccgccacgggcctgaccaagcggacgaaaatgtcgctgctggcccgcttcaactacaactacaaacagcgctactacctcaccgtaacggggcgttacgacggttcgtcgaacttcgccgccaacaacaagtggggcttcttcccctcggtggccctcaaatggaacgccgccaaggagaatttcctgaaggacgtacgctggatcgacgagctgtcgctccgcctgagcgccggacgcacgggtaacgacgccatctcggcctaccgttcgctggcggccatgtccagcaccacgagcggctatctgttcgacggcatgcagccgggcgcctactaccgcagccgtctggccagccccaacctgacgtgggagaagaccgacctctacaacgcggcgctcgatctggcgttcttcaacaaccgcctgatgattacggccgaaggctatatctccaagacgcgcgacctgctgctcacggtgcagaccgcttcggcgacgggctacaccagccgttacgccaacatcggcaaaacctcgaacaaaggcgtcgagctgagcatcgagagccgcaatatcgtccgtcccaaattctcgtggacgaccaacctcaccatcgcccacaacaaacagaacgtggacgacatcggcagcgaggatttcgtcacggcgctctcgtcgcccggcaacaacccctacatgatgtacggttacgtcaaaggctacccgctcaacgcgctttggggattcaagtacggcggcacgtggaagagcgtcgaggagttcgagcgcaacagcgtgacgaacacctacgtttcggcgctggcgatcaacagcgacgccgcgtcgcgcaaggcctcgctgggcatgccccgctactacgacatcaacaacgacggctcgctcaacaacgacgacctcgtctatcagggcaatgccgaccccgacctgtacggcggtctgcagaacaacttccgcttcggcaggctcaacgtcggcatctacttcacctattcgctcggcggcaagatctacaactactcggagctttacatggccggcagttcgatgtcgaaccagtaccgctacatgctcgaagcgtggcatcccgtgcgcaacccgcagtcgaacctgccgcgcgccggtgcggtggacgcgcacgtgccgagcgacctgatgatctacgacgcatcgtacatccgcctgaaaaacatcacggtgggttacacgttcgacctgagcaagcgttcgaagttcatccgcgacatcacgctgaacctgagcgccgaaaacctccacatctggaaaaagtacaacggcttcgaccccgacgtctcgaccgacagcagcgattcggcgctgcggcgcgtcgatctgggcgcataccccaagccgcgcaccatcgtgttcagcatccagctgcgttattaaccgtaatccgagaacattatgaaaacaaaatacatcttgctgattctcacggcgtggctcacggcgtcgtgctcactgcaggaggacaccgaagggttctcgacccccggcgacttctataagaccaagacccagtgtcagtcggcggtgaactcgtgttatatacccctgaaaaatctctacacctacaaaatgatgatcgccaccgaaggcgtcaccgacctgatgtatatcgcatcgggaacgcaggacgcgcagctcgacatctcgccgtcgcagccccgcttcggcgccgacatgtggacctacggctaccgcggcgtcatgtactgcaacatggccgtgacgggcatcgagaattcgacgatcgacgaaaaggaccgccacagcctcgtggccgaagccaaggtgctgcgcgcgttctactactacctgctgacgagcttcttcggcgacgtgcccttctacacggacgacgtctccgaccacgaagtgctcgaccgcgtggccaaactgccgcgcatgtcggccgaggcgacccgcaccgcgctgatcgaggacctcgaatcgtgtctgggcgcactgcccctcatccgcacgagcgaggctgcgggcaaccgcgccggagccgccatgggccacatgctcatcgccaaactcgccatgtggaacaaggattacgacaaggcgctcgaagccatcgccgtgctggaacagatctacggcgacgacctctcggtctacccggtttcggacattccgttccggatgaagaacacgcccgaatcgatcttcgaggtgcagcacacctataccgccggcggcctgatctacacctccaacgtcgccagcatatgcatgccctatccgcgcaacagcgacaacgtctactcgaacgtggtgatcgaggagctgggcgacgccgccacgacatggtcgccgctgcgccccaacagcttcttctacggcaacctcatgcccgaaggcggcgaagacctgcggcgcgacatgcagataatcaccgagtggaacggcgtgaagttcacttcgggcgacgcgatcgtcacccggccgttcatgggtcccaaattctggtgccccgaccttcaggccgcctacgactcgaacaactacaaggtcttccgctatgccgacgccgtgctgatggccgccgaatgctactgcgccctgctcgacaaggacaaggccatggagtacctcaacaaggtcaaacgccgcgcgggcatcgccgaatacacgcggttccgcacctatccgctgctgctcaacgagatccagaacgaacgcggccgcgagctgctgggcgaattccagcgcaagttcgacatggtgcgctggggcatctggtacgaacgcacggcggcgctttcggactatgcgaaggtcaagacctcgatccagccctgccacgaatactaccccatccccgacacggaggtgatctattcgggcggcgctttggacaacaacgaatacaagaagtacggattctaaatcaaccgacatgaaaccgaaaaacaaaatatatcccctgctgcgcatgctggccgtcgcgctgaccgccgcactgctcggtccgggctgtcagaaggacttcaaatggaacgagccgctggccgtcacccaaaacggactcaacctcacctccgcggccggttcgacgcgcgtcacggtctactccacggggcgctggaaagccgaaatggccgaaggcgcatggggcgaagtgagcgaggtgtcgggcaacggcatcggcgacttcctctttacgtacgaagccaacaacggcgtatcgcgccgcgcgcgcatcctcgtcagcggcgagggcgaagagcaggagatcgtcctcacgcaggccggcgcggtcaccgaaccgacgctggcgctcgccgaaaccgaattcgagttcgtgcgtctgccgcgcgaacgcgtccagatcggcgttacgaccaacatgacgcaggcgctcgaatgtatcctcatcacggcaaccgacgtcaccgacgcggagaatcccgccgaagccggctggctgaaggagatccggctcgaaaaagacgccgaggagaacatcgtgctggtcttcggaatcgaccgcaacgacggcagcagcgaccgcaaggcggcgatccggctcgaaatccccgatgccgacggcaagatcctcgcccaagccgaagcctccgtcgtccagaccaccgacaatgcgacggtcgttttcaaggacgaagagacgaccgtatccgttccgggcgaccagcacaaccgcagcgcactgctgacggccaacttcgacgtcgatccggcgcacttctccttcgacatcgcgtacgaccccgcaggcacgcagtggatcacggacgtgaccttcagcgaatcggccgtatcgttcatcgttgccgagaacacgggcgaccagccccgttcggccagtctgaagatcacctacaaggacaccgacgtggagtgcagctcgacgctccggctgacgcaggaggtcaagcagctctcgatcgccgacctgcgcgccatgatccccggagcggaaggcgaagtggagctgacgggcgagaagatgctctcggccgtagtcatcagcgacgccggcaactacaacatggagaccaaccccaacctgacggacacctcgatcgacttctcggtcaacgagaagaccgcctacatcgagagcctcgacggtcagtacggcctgcgcatcgtcaccaaacttccggccgacaacatcctgaaacgctacagctcggtacagctctcgatcaatgggctgaagctggtcaaggagtcgaaccccgaacgctatacgctcacgggtttcaccaaagaacatgtcctcaaccagaacgccggaacggccgccgacctcccgaagaaggagaagcacatttcggagcttaccgatgccgacatctacacctatgtgacgctcaaggagtgcgaattcatgctcaacggcggcgcctacatcaatgttcacgacggctactgctacaagaccgacctcaacacgcagggcgtgcttgatccgcgcttcgactgcgccgtccgcggcgtgatcgacagccgcggcgagaagatcaacatggtgctcaacacgcaggtgcgctggcgccgcaagggcgacggcgttccggccggctccggccccataagcggcatcatcgtccacaccaaactgccgcgctacggcgtgaagggcgacgtgggcacctaccagatccgcccggtcgaggaggccgacatcgccttctcgcgcgaagaaagcacccgcaactactcgacgctcgtacgctgggcatggcccggcatgaccaccaacgccggcatcaagcagcacgcggacggcagcattgttccctatctgggcgaaggccgcatgttctcgtcggtgagcaacaaactcaacacgtcggcatcggtggcaggcgtctcctgcacgctcgactacaacaatctggtctatgccaagggcatcagcgctccggccgtgcgttacaacggtatctggtggaactcgtcgcgcaacgagggcgaatgggtggccttcaacttctcgaccgagggcgtcagcggctcgtgcatgaagatgatcctctcggccgcactgggcaacctgagcgccgccacgatcgtcgctccgctctactgggacgtctcctactcgctcgacggcagcaccttcacccggttcgacaccgtacccatccgcacgctcgtctattgggccggcccgcagtggtacgttccggggctttacgaagttgacttcgacctgccgtcggcctgcttcggacagaaggacgtcaccatccggctgcaggccgccagcaaggtgtgcggcagcaccacgggcgaggacaacggcacgacgacgaagacctacgtctatttccgcttcggcgacgtttcggtcaaatatttctaaccacgtaaaaaacgcaatcatgaaatacgcaaagagatacatggcaaagatcggctcggcgggcatcctgctcacggcgctggccgcgacggcctgcatggaccacggcgacgatattccgctgatcgagctgggtgcggtcgagaattcgttcaccgtcaacgccacggcgggccacgtcgacatacaggtctactccaaccagccggccgtgctgtcgttcctcgacgacggggcctcgtgggccgacctgagcgacacgcgcctgccgctcgacggaaaattctacatcgactacgccgacaacacgggctttccgcgcatgacgcgcgtactgatacagagcgccgacgcagtacggtccgacacggtcgtactgcgccagcggggcgcccgtatccccgcaatggcgttcgagggcggcacctcgaccaacgtaccgggcagttcgggcggcaaggcgtccgtacggttcggcaccaacatcgcccccgacgagctgaccttcaccacgcagtacgacgccggggaggaaccagccgaagagtggctttcggaaatcgcgctccaacccgccggggaggaggaatacacgttcaatttcgactacgccggcaacgacacggacgaactccgcacggctacggtcaccgtctcctacgtcaacggctgggaagagaccgaacagctgacgctcaacgtcatccagcgcacgaagaacgacatgctgggacacgacatttcgttcgccgaactgcgcgagaaagcgctcacggtctcgaaagtcgatgagtactggctgctggaaggctacgttgtcagcgaccgggattcgaagaacgccggcaacaacccgatgccgaccgacatgagcgtcgattacagcggatgcgagaagaccgtctacctcgaatcgcccgacggccgttacggcttctgcgtcgaaacggccactccggaggacaacgccttcacccgttacgacaaggtgaaaatcctgctcaaagacgccgagctggtcttcgaacccgatccggaccgctacatgatcaaaggcatccgctcgtcgatgatcgtcgagcgcgtgacgggcaacgacgcctcggtgcttccggtcaagcagaaatacatctcggagctgaccgacgaagacatctacaccttcgtgacgctccgcgactgcgaattcgccgtccgcaagggctcgctcacccccgtgcacgagggctacacgctggccgacgcgcagggacgtctcaacatgtacccgcggctgatacgcgacaacaagggcagcctgattcacctgctgaccaacaccacttgcccctaccgccgcaacggcacccgcctgccctacggttccggcgaactggcgggcgtgatcgtccacgagcgtttcccgcagtacgagtacgtcgatacggcggacgatctggccaacggcatcatcggctcctaccagatccgccacatgtccttcgccgacatccgcttcgccgaagaccgctcgcagagcttctcggagacgctgaccgaatacagttacgtcaagggcaaggccgcggccgccgacggctacgcctactggtatccgacgtggggcaccaacggacgcttcacgcagaccgcctccaagtcagcataccccaacggcgtctacaatgcggcctgctggcactacttgggctggtgcggcacggcgcgcggcacggctccgttccgcagccacatcggcaacgacggctattcgggtttcggcgtcatcctcgaagacggcaccaattacgccgtgaaaagcacggcagtcaataccgacggcaaaggcaccgaccaagccaactggctggcgtgggtgacgacctactggtggaacgcttcgaccgaccggccctatgcgtgggtcgtggagttctcgaccgccgggatttcgtccgaccgggtatcgctgatcatgagcgtgcagagcggccgcgcgacactcaacgcaggtccctacttctggaaagtgcagtggtccgcaacgggcgattacgagagcgacgaggggtggttcgacgtcgaagcggcgcagaccgcgcccgacggcagcgcctacaccttcacgcagcccgacttcccggtattcgccacgcagcgcagctggcagctcccggcctataaacaggtcgaaatcccgctgcccgccgagatcatgggccgcgaaaaggtctggctccgcatccagcccgccagccggctctcgtcgggactcggtttcctcgacggcacgatcccgatgggctacaacgccgccggagcgatggactacttggccgtacgctacaacagataacccgaactccaagatctaaaaaccaaaacaatgaaacgattcctattttcgatagctctgttattcaccgctttggccggatgctccaaccacgaaggcgaatccacagcccccaaaagcgaactcaacgtcatgagctacaacatccgctacgccaatgcgagcgacaagggcgacgcggcgtgggacgcccgcaaggaggcttccgtcgcgatgatccgcgacgtcaagcccgacgtgatcggcatgcaggagcctcgcttctcgcaggcgcagtatctgatcggcgaattgaccgagtacgagcactactatctggcccccgatgacaaggactcgcagcaccgcaatgcggtctggtggcgcaaagaccgcttcgagatgctcgcccaagggtatttcttcctcaacgaaaaggacatcacccagccgatcaagggctgggggcacaaccagttccgcacggcgttgtgggtcaaactgcgcgagcgcagcaccggcaaggagtttttcttcttcaacacccacctcgcgcaccgcgcgtcgcccgtcgagggcggcgatatcgatcaggtggcgcgcaccgagtcggtgaaactcatcgtcgaacagatgaagcagatcgcgggacgctacgctccgatcttcgtcaccggcgacatgaacgcctcctacgccgcgggcgacggccgccgcacctgcctcgacggcttcttcgaattcatgtggtcggcgcgcgaaacggcgcccgacggcgaagccgacgacgtttacagctacaacaacttcggcgaaggcactccgcgctttacgtggaacatcgaccacatcttctaccgcaaggtgacgcccgtccggttccgcaccatcaacaacgacggctacggcgttccctacatctcggaccacttcccgattctcttcacgtcggaattctgatgaacactgcatgcggggcggctccggccgtcccgcacgcataaaatcccgcaacatgaaaaaactgctgtttacgcttctgttctgcgccgcggctgccgccgcagcgggcagcgaacccgcggagctgaaactgctctcctacaacatccgctacatcggcgcgccgggcgacgaaggcgacttcgcgtgggacgcccgcaaggaggcttcgatccgcatgatccgcgacgtgcggccggatgtcatcggctttcaggaaccccgccgccaacaggtcgcctacctcgtcgaacagctgcccgaatacggccacatcgaaatgggacgcgacttcggcgccaaggacgatcccggcgagcatctgatgatcatgtatctcagggagcgatacgaactcctcgaccacggccactactggctgagcgaaacgccggacgaagtgtcgcagggctgggacggccgctgccgccgcgtgacggtgtgggcgcgcctgcgcgaccgcgccacggggcgcgaattctgccttttcgatacgcacctcgaccacatcggcaaaacggcccggctcgaaggcgcccggctcaacgtcgaacggatgcgaagcatcgccggcaaacgcacgccgcagttcatcgtcggcgacatgaacgccacggcgggcacgccgggcggcgtatgtctcgaaccctatttcaaatggctgaaatcggcctgcgaagaggctcccctgaccgatccccggccgacctatcacggcttcggcaaggccaaaccgctccacatcgaccacatcttctaccgctgcgccgaaccgctgcgctaccagctgctcgacagcacgggatacggcgtgcagtacctctcggaccactacccgatcgtctgcacgttccgcttctgaccgggcggcagtgtatacacgacaaaaaccgcagaaaccgttttgtccggtttctgcggtttttcattccggacaacgcccgaagaaaattgggccgctccgtccaatatcgccgcgcggcaaacacgcacgcgctccggataatccgccgcccgccgttccagccaacccgccgaccgactaaccaaccagctaaccgaccgaccggccaaccggccaaccggccgcaattccgatcaagggcggtcgaaggcggccgaaaccggtcggcacgacgccgttcgcgccccgccgcttaaaattcgacggtgattcccagcgtcgggatcagcgtcccgctctcctgcctgatgtatttcatgcggtaacgctgttcggcggcgggcgcttcgggattctccaccacgcccgtggacatcagcacgtcgggctggcgcagcttgctgcccgttacgttctgcaggtcgatataaagccccagcatgcagtgccggaaatagaaggtcttgtcgatgcgcaggtccagctgggcgaaggcgtccagccgcccgtcgttatagcgcgcatagtcgtaataaggccgcccctgcgcgtcccatgcctcgaccagcgacgattttccgacatcgtaaggcgtatagggcgttccgcccacggcgctcaggcgcgccccgacgctccagctgcgcggcaggtcgtaggtgccgctgaggttcacgacgaaacggctgtcccacgccgaaacgatatagggagccgctgaatcgcggcggtattcgctgcggaacagcgtgaccgaacccacgagattgaccttgccgggaatctgccagcgggccatcgcctcgacgccgtaggagcgtccctcggccgacgagcgcagctcttcgttgcccaccacgccgtaatcgttgcccttgcaggagagcggaatcccgtccgcgaccgaaagcggaatatccccgtacaatttgtaaaaaccctcgaccgacacgatcagccggtcgcgcagccgccatccgacacctgcgctgaaagccccgacgcgcatatagtgcagggatttgttcacccacgcatccgcctccttgaatccgagcgccgtatagggcggcagctggtaataaagccccgcgcttccgctcagcgaccagcccctgccgagccgatagccgaccgaagcccgcggcgaaagctggtgccagagccgggccatgcgcggcgagtagtcgttcccgtcggcgcgcaggccgagcgaagccgtgaaacgcttgtcctgcgaagcgtaatccgccccggcgaaaagcccccagccgacgattcccagccgggtccggtaatcggacagcagcgtctcgtcggtgaaaagccgctggaacgtgcggttcgtataactcgaataactcagctccgcgccttcgcgcaccgtccagcgacccagatagctgcggttttcagcccgcagcgtggttttctgctccacggagcgcagccgcagggtgaggttctcctccgaagagtcgtcgttgtcgcggtatttgaggttgcggttgttcaggtaagtgtggctcagcgtgacggtctgcacgtgacggcccgcatagtgccgccacgacgtgccgacggtaaaggtctcctgccgaatccggggcaggtagctcagcaggtattcggcatcctcgccctcctcgtcgaggttgagtttcatgttgtcgaagcccgccagccccagcaccgtcagttcgtcgcgctccgaaaaacgcgtcttgaccttgaactgtccgtcgatatagttgggcaggaacggcaggccgatcatcttgaagagcaattgcaggtaggactgccgcagcgaaaagagataggaggttttcccgccgatatgtccgctgccgctcagcccgacttccgacgctcccagcgtcgccttgaaggtctgcttttcgggattcccgtcccgcagccggaaatccagcacggaactcagcgccccggaacggtcggccgggaaagccccggtatagaagctgatctcgcggatcaggtcggcattgacgatgctcaccggaccgcccgtggctccctgcgtggcgaaatggttgatattagggatctcgatgccgtccatgtagaatttgttctccgagggacctccgccgcgcacgatcaggtcgttgcgatagcccacgggcgagaacgacacgccgggataggagcgcacgatgcgcgatacgtcgcggttggcgccgggactcttttcgatctcccgcaggccgatcacctgcaatccgacgggactttcggccgtggcccggaacggcgaaggcacaacggtcacggcttcgagctgcgtggcgtcctcctccagctcgatctcgataaagggcgtggccgccgacacgatgtattccggcgtaacgacgcttttgtagcccaccgacgaagccgacaggcggtgaatgccgggccgtacgcgccggagcgtaaagtgtccggcggagtcggtcgagacgccctgctgctcctgcccgaccggcacgaccgccgcataggccacggggcgccgcgtcagacggtcgatgacgcggccgtttacgggatagccgctctccggcgttccggccgccgcccgcgtgcaggcaagcagggcagcgaaggcacatatgattcgtaatccgagagacatcatatggcaaaagtacaaaaaaagtacaaaaccgttccggttttccagcggcttcgcccggcaaattccccggccggtccgcgaagactccgcggaccggttccgcacggcgctcgctccaataaaaaagccgtttttaccaaccggaggtttcgaacattattaattcgataagcgaacaaaccgcagccaagaaaaaaatcggcggttttcttggccgctccgcaaaacgtattattatatttatatataataataaaaccgcctgcaactttttccgccggaaaaacaccttgaaaaatttcacaaaaagcttgtatttcagcatattatcttttacctttgcaaaaccattacgacagtgcccgtcactgccgcgccgtgcagccccgttcttttcggagggtgtaccggtttttcgacgcaacaccagacagaccacattccgaaccggacaaaccggtgaaattgcagcgcacgacacacgctgtcctccggtcggttccatatattttcggaggtctgtggccgaaaatgtctcaccagtcgatttatataaaaataaaaagttatgagaaagcaacattacacagccgaaattccagtttccaatccctacaacatcgccgcgttcgaggatctggtatccaatatccaagcgggatacaacgaagaaaaacgactgaagaacgcggctttcgaattcatgatcgaccgggggatttatctggaatttcacgaatggctgcacgctcccgaacacaaggagcacggcagcgacgtcatggggcgcctgcgcatgtacatgacgggcaacaggctgacgaaaattttcagccggtaacgaccgtaagaccggattccgatacgacgcaaccgaggctccggctcacacaggacgaaaaaaccactcccagacagggagtggttttttcaaatcggaaggacgaccgcttccggtcactgcagatagaccccgatgtttccgctgatctgctgcagcgatatttcgcagagcttggtattgtactgcgccgtgaggatgcgctcctcggcgtcgagcaggctcttctgcgcctcgcgcatctcgatgccgggcagatcgcccagcaggtaacgctccatggcgatttcgtagttctcgcgggcggcgatcaggttctcggtttcgagctggatcacttcgaggttgttgcggtaggcctgccagaaattagacagattcgccatgagcgactgctccagctgctgacgggtcaattcggtgttttcgatcgtgatccgggcgttgcgctgctcgcggcggcggttgccgtcgaagatcgtgaatcccagcttcaccccggcgttcagccccagcgtaccgcgcgactgagtggcgccgttgccgaaccggttgtaggtatatccgtacccggcggtcaggttcagataagggtagaagcgcgaacggatgcttttcaggtccagttcggccagcgtgttgtcgtgcccggccagcagcagcgaagcgttcgcagcgcgcgtttcagcctccagacgatcccattcgagtgtgctgttcacctcgatcagcgaatcgcagatcgaaagcctgccgttgagatcgtcgttggccagcagttcgttgatgcggatgcgcgatgcggtcaccagctcgtgctgggacatgtatttcgaactgtcggcattgaaatccacacgcgcctgcaacaggtcgagacgcgagaagctgccgatcttgaaccgctcttcggtaattcgcagccgctcgcgcgagagctgcaccgcataacggaaattgctcagacgcagggtctgctgcacataattgtaatactcggccgtaagcgtggcgacaaaatcctcgatcgtgatgcgggttctgagcgcccccatctgctgcaactcctgcagccgcttgtagttggtgcggatgcggaatccgtcgaaaagcgtccagttcaccgcaacgccggcgtcgaaggtctgatcgtaaatgccgttttcgatcacggcgtccccctcgcgcggggtcgtgcgctcgttgtccagcgccccgctgtagccggccgtcagatcgacgctcggcagcatcccggcgttggccgccgtcgcgtcgttgtcgctaatgcgctgctcgttgcgtatgatgcggacgtcgtaattctgctccagtccgagctccagacaccgctgcagggtcatcggctcgccgcactcctgcgccgcggccgctccgacagcccccgcggccagaaccgttaaaatcagtcgtttcatttcgcgttctttttcgtttttcggatccggtcggtcgatacgtaactgtaaatcgccggcacgatataaagggtcagcagcgtcgaaaccaccatgccgcccaccacggcgacacccatggcgatacgtccctgcgccccctcgcccgaagccatcgtcagcggcagcaggcccagaatggtcgaagcgctggtcatcagaatcgggcgcaggcgctgcagcgaagcctgctcgatggcctcccgcttgttcagccccgcatcctgcttctggttggcgaattcgacgatcaggataccgttcttggcgaccagaccgatcagcatgatgatgccgatctggctgaatatgttcatcgtctgcccgttggccgccatgaacaccagcgcgccggcaatggccagcggcacggtcagcatgatgaccagcgggtccttgaaactctcgaactgcgccgccagaatcagatatatcagcacgatagccagcaggaaggcgaatatcaggctcgaagaactctcgcggaactccttcgaatcgccggccagcgccgtacggaagtcgtcgccgagcgtctgctcggcgatacggtccatttcgtcaagcccctgcccgatggtcttccccttcgccagtccggccgaaaccgtagccgacagaaaacggttgtagtgatagagctggggcggcgcgacgttctcttcgagcgtgatgaggttgtcgagctggatcatctcgcccttgtcgctgcgcacatagatcgacttcaggtcggcgggcttgttgcgctgctggcggttgatctcggccagtatctcgtactgcttgccgttcatgtagaagtagcccagacgctggccgctgagtccgtactggagcgtctgcgcgatattgcgcgtgctgacgcccagcaggttggccttgtcgcggttgatcgcgatgcgggcttcgggcttgctgaatttcaggtccacgtcggccatctggaatacggggctttcgtagactttccgcatgaattccggcagcacctcctgcagccgttcgatattggtcgcctgcagcacgtactgcaccggcatgctgccgcgccgtccgccgaaggtgctctgctgctgcacgaacgcgcgcgccttggtcctcgtgcgcacggcggccgacacctcctcggcgatctccatctgcgtacgctcgcgggtcgcgatgtccttcagggcgatctgcacgttgccgcggccgctggagacgcgcgccgtcacggcacgggcttcgggcacgagcgaatcgacgagccggttgatgccctcggtatagtcgcgcaggtattcgtaggtcgcgccctccgatccgcgggtgttgatcgtaatctgcgaacggtcctccagcggcgccatctcggccgggatgctcccccacagccacccgatcaggccgatcatcagcgccacgagcggcagggctatccagcgccgccgcaggaacccggccagcgtgcggctgtagaaattattgagccagacgaaaaacggctcggtcttgttgtagaaccagctctgcttctcctgccgcacgagcagtttggtagccagcatcggagtgatggtcagcgccgcgaaggtcgagatgaccacggcgcccgaaatcaccagactgaactcgcggaacagacgcccggtcatgccctccatgaagacgatcgggaagaagaccgcgatcagcgtgatggaggtcgaaatgaccgcgaagaagatctccttcgccccctcgatacccgcttccttgggcgacatgccgcgctcgatgcggatgtagatgttctcggtcatcacgatggcgtcgtccaccaccagtcccaccgagagcaccacggccagcatcgacagcacgttgatcgagaatccggccacatacatcaggaagaaggtgccgatcagcgacaccggaatcacgatacacgggatcagcgtcacgcgccagttgcgcaggaacaggaaaataatgatgatcaccagcaggaacgcctcgtagacggtctgtttcacctcgtcgatcgaagcgcgtatgaagcgcgtattgtcgaatccgtaatcggtcaccacatcttccggcaggtcctttttcatcgactccatgcgtctgtagacctcgtccgcgatctcaatgtggttggctcccggctgcggcaccaccacgatgccgaccatcggaatgccgttcatcttcatatagctgcgcgtatcctgcggtcccagctccgcgcggcccacgtcgctcagacggatgatgcggtcggcgtcctcgcgcaccaccagatcgttgaactcctgcgaggtgtgcatcagtcccagcgtgcggatggtcagctcggtggtgttgccctcgatgcttcccgacggcagctcgacgttctcccggtcgagcgcgctcttgacgtccgccggcgtgatgccgtatccggccatcttggccggatcgagccacagtcgcatcgaataacgcttctcgccccatatctgcacgccgctcacgtcgctgatcgtctgcaactgctccttgaccgtcaggtcggcgatctcgctcagctccagcagcgaacgcttgtcgctctgaatagtcaccatcaggatcggcgtagcgtcggcgtcggccttggtcaccgtcggcgggtcgcagtcgcggggcaggtaacgctgcgcgcgcgacaccttgtcgcgcacgtcgttggcagccgtttcgaggtctaccgaaagttcgaattcgaccgtgatgcggctctggccctgactgctgacgctcgacatcgaccggatgccgggaatgccgttgatattctgttcgaggggttcggtgatctggttctcgatcacatcggcgttggcgcccggataggagcacgtcaccgagatgatcggattgtccacgctcggaaactcccgcacgcccagatagctgtatccgataaagccgaatagcaggatgatgatcgtcagtaccgtggacaatacgggacgccggatgctgagttcggaaatattcatacggcggcgggattattcgacgacgtcgagtttgacgggcagatcggtccgcagctgcagcgtgccggaggtaatcagcgtgtcgcccacgttcagcccctcgataatctgaatgctggactcggtccgcaggccggtcttcacctcgacggcctgcgcctttccgcctttgtagagatataccttgtccacgcccatctccggcacgatggcttcggtcggcacggctatggcgtcgggaatgtcgtgcaggcggattttaacggtcacgaaacgtcccggcagcagcgttccccgcgtattgggatagagcgcccgcacggccagcgtgcgcgtggcgatatccaccttcgattcctgcgcgtagacctccgcccggaaggtctcgttccggccttcgaccgtaaacgaaagcggcgttcccggcctgatctggctggcataacgctccggcacgaagaggtcgatcttgagcggcgaaatcttcgtcagcttggccaccaccacgctgggcgaggcgtaggcgccctcgctgacgtttcgcagaccgataattccgtcgaacggcgcacgcagctccgtcagcgcgatattggccttgacgatgtcgatatcggcgttgagcatcgccagctccgtactggcctgctcataggcctcctgactgacggcgtccttttcgagcagcgcgctctggcggtaaacccggtcctcggccagcttgagctgcgcttcgtagcgcgacagctgcgccagcagcggtttgtcgttgaccttggccagcagttcgcccttgcggacgatcgacccttccttgaaattgatctcgacgatcttgcctgaagtctcgaacgagaggtccacctcttcgtccggcagcaggttgccgaccatcgtaatgccgtcggcgagggactgcggacgcacgacgagtccgttcacgttcaggacgctcttcttccggggcgcgctcaccgcggccggatcggcgtccgaagcggaggagccggggccgaagtgtctgtaaacgcccagcacggcacaaaatacgacgaggataacggccgtaacgatccatttctttcttttattcattgcagcaagtaaggtttgatttcggagtcagggcaaagatacgaaaaaagcgcatgcaactgctattcccgaccggcccgattgcgctccctgcggataaaatccgcagcttccggccatccggcagacatcgcagagggccaaacggcaaaaatcgggggtgaaacgccgccggcattccgcaaaaccgggcatgcgcgcagccggaagccgtaccattccggtgcgaaaaatcacgacgctccggacgcccgaaataggaaatacgcaccgcaccgccgccctgcggcagccgaaaggcacagaatttgaacgacgaaccgcaaacagaacaccgtgccgcaaagttttgcaagaatcgaatcatttcattagaagccaagactttccggacacggacgtcggtcccggaaaacatccgatattaaaaatttaacgtatcgcaatcccgtttcctgaaaaatttatgtactttagcccctgtttgcaatttacacacccggataacacccggattttcgaccacacgacgaaagaatggacaagcaaccggacgaattgatcttgcagagcctccggcagggcagttacgatgcattcgatgcgttgtacatgcgttacgccccgcatgtggaggcgtttgccttctgcatgctgaaaaaccggagcgaagccgaggatctggcgcacgatatctttctgaaaatctgggaaacccgcgagtcgatcggccgcatcaaatcgttccgcagctatctgttccggatgaccaagaacgccgttttcgacatcttcgaacacaagagcgtgcaaacccgttacgaacagcggctcctgcacgtcgaggaccttctgacggacgacatttcgacgaaggtcgccaccgaggacctgctgatgattatcgacatggccgtggagcagatgcctgagcagcggcagcgggtcttccgcctgagccgctacgaagggctttcccatcagcaaatcgcacaaaaactgggcgtaacccccaaaaccgtcgagtatcacatccgcacggcgctcgccgaactgaaaaaaatcatcggcgtcatcgccttcttcttctgattcttccgcctcacgcctcccggcagacaaagacgacacgaaaattgttgtctttttttatttgcaaaaaaattcagatcccgactagggacgcccctctttttcccgtcatactattacaaacgcacagaaagaacggacatgataaaaaagataatacacacgttcctgcacaatccgatgccggaacaggtacagcagcagtttcggacatggtgcctgaacaaggagcgcgcgggcgaaaagaccgacgccttatggaaggaatgggagcggctcgacccggcgtccgtccttccggcggacgaaaaggcctaccgccgcaagctcgaccggctgcaccgcgaaatgacgcctccggccgccccgaaacgggggctgttcagcatcacccgccgcacggccgccgctgcggccgcaatcgtcctgctggcgatgtccgtcgaattcttcgtcgtgaaacgtctctcggccgacaccacgacatggctggtgaccgccgaaaacagcaaaggccgcttcacgctgcccgacggctcggtggtatggctcaacgccgactcccggctggcctactccgaccgcttcacggcttcgggcagccgcgcggtccggctcgaaggcgaagccttcttcgacgtgaaacgcgacacgctgcgccccttcgaggtggagatgggcaaactccgggtcaaggttctcggcacgcgcttcacggccagccatatgccggcgttcaacacggaggaggtgacgctcctttcgggcaaagtcgaggtgtcgggctaccgcgccgaccagtcggtcgtcctcaccccggaccagagctgctcctacgacgccggttcgggcgcggtcgccgtgcgcaacgtcgcggccagcaactattgcagctggacgggcaactcgatcatcttcgacaacatgacgctggccgacatcgccgtcaatctggagcactggtacaacatccgcttccggatcgacgaacgcatcgacacctccatacgcatttcgttcaccctgcggcccgaaaccctcgaagagacgctcaagatcatcgaaacgctgacgcacctccgctgccgccagatagacaaacactacgtaataatacacaaataaccaagaaaaccgaccatggaacgcaacacatgaacgccgggagacctccccggatcttctttcaaagaaactcaagaaactatcaatcaaaacttaaaactcagtcatgaaaaaagatgaacgcctgaatttttccgaccggacaccctccgtgcggagacttgtcgtgtcgcttgtcctgatgctgctggccgccctgccggcagcggcgcagaacaagaaaatcaccgtcgatctggacaacgtcccggtccgggaatttatcaaaaccgtggaatcgcagagcggttatacattcgcgtataacaactccgaaatcgacctcacgcgccgcgtgagcgtcaaggcggccgacgaaaacgtcgtagacgtcgtcatccgcgcgctcagcgcccagaacctgaccgcccgcatggagggcagccgcatcgtcgtcagccgcaaaccggccgccgcacgcgtacagacggcgcaacccgtaagggggggggtagtgaccggaacggtcaaaacgatttcgggcgagcccgtcatcggcgccagcgtaatcgtcttggagaccaaccggggcaacgtcaccggtcttgagggcgacttctcggtcgaggccacgccgggccagacgctctccgtctccttcctcggctacaacacgcagcagataaaggtcggcagccagacgtcgttcgacatcacgctgaccgaggacagcaagcagatctccgaagtgctggtcgtcggctacactccgatgcgcaagagcgactttacgggatcgatcgccagcgtcaaagccagcgaactctccgccaccacgcccaccgtgggccagtcgttagtcggtaaggtcgccggcgtcgaagtccaccagaccagcggtgcgccgggcgacggcgtaaccatccgtgtgcgcggcgtcaattcgctctcggcgagcagcgcgcccctttacgtcatcgacggctatcccgcttcggaggacgtattcatcaaccccaacgacatcgaaagcatcgacatcctgaaggacgccgcttcggccgccatctacggttcgcgcggtgcgtcgggcgtcgtgctcatcaccaccaagcgcggcaaggacggcgaagccgccaaagtcagctacgacttctcgtacggcatccagcagctcgaccacaaggtggacctgctgaactcgacgcagttccgcgacctgctgatcgacgcccgcaacaactcctaccgcctgcgcgccacggccgccggcgtgtcgtggagtccctacgacgacaacacgatccgcgccgccaaaggcttctcgctggccgaagtgggcatccacccgatgttctacgacttcacgacccgcacccccgtaacgccgcagtacgacaccgactggcaggacgaactcttctccaacgccggcatcatgcgccacaacgtatcggtcatcggcggcacgaaggccatcaagtacatggccagcgtcggttacatggatcaggacggtatcatcgcaccgtcgaaccacaaccgcatcaacgcccgcatcaacctcgacgcccagatcaccaagcgcctgacggcgagcatcagctactcgatgtacgacgccaagaacaccgtcgtacaggccgagggccgcatgatcaacgacggcgtgatccagagcgcgctgatgtacctgcccaacctgccggcctacgaggaaaacggcgattacgcccgcagcgccatgatccgcatgaagacggactggggcatgaacttccccgaaaacccgctggcgatcgccaacgagctggacatcaacgagaagatgtcgcgccacaacctcaatctcaatctggtttacgagtttctccccgacctcaagctctcggcccggctcggccagcagtggtacaactaccgctatttctattaccgcccgatgagcatcggccgcgatgccgcccccgcctacagcgaggagctgcgctcgtcgaacatcgcccgcacgacctcgacctacgacgtggaccgtctgggcgagttcacgctcagctataagaagaagatcggccgccaccacatcgacgcgctggccggctacaccctccagaagaagacctacgaccgtctgggcgtcgaagccacgggcttcgccgacgaccgcatccacgaggttacgggccacggctcgaacgcctcggacatttcgctctacagcacccgcaaggccgcatgggccatgatgtcgttcctgacccgcgtcaactactcgttcgacgaccgctacacgctgaccggctcgttccgcgccgacggttcctcgcgtttcggcatcgacagccgctggggttacttcccctcggtatcggccggctggacgctctcgaacgaacccttcctcaaggatgcgctcaaggacgtggcttcgatccgtctgcgcgccagctggggtaagagcggcaacaacgacatcggcaactacgccagcctcgccggcatctcgtcgggcagctacgccttcggccagactcccgtatcgacgacttacgaaggctccttcaccgacgccgcgctgggctgggaaaccacccgccagactaacgtcggtatagatctgggcttcttcaacggccgcctgaacgtgatcggcaactggtacaactccatttcgacggacatcctctacaaatacccgatctcctcgatctcaggcgcgacctcgacgacgaccaacatgagcggcgccaagatccgcaaccgcggtttcgacgtccagctcgacgcacgcctcttgacaggcaaggtaaactggaacttcagcaccaacatttcggtcaaccgcaacaaggtcgtcagcatgggcggtctggacgacatcatctccaccaccgaacgctccgtaggctcccacatcaccaaagagggcaagcccatcggctcgttctacggctatcaggccgtaggcatcatgtcgaaggccgactatgccaacgccctgctcgaccgcgacgtctacatcaagaacggcaacaaattccctgaaggctaccagctcaagggtccggccgtggcttcgtacgccctcgacaacctctcctacggcaatgccatctggaaggacgccaacggcgacggcgtcatcaccaccgacgacaagacgatcatcggcgacgcctaccccgacttcacgggcggcttctcgaccagcctgtcgtggaacggactcgatttcagcgccagcttcgcctattcgtacggcggcgaggtcatcaacttccaagactactacctctacaacatggagggatcgggcaaccagtattcgatcgtcgccgaccgctacatctcggacgcacagccgggccgcaacaacgtgcccatcgcgtcgcgcatctcgacgaccaacacctcgctcaaactctcttcgtattacgtggaggacgcttcgttcttccgctgcgcgaacatcacgctcggctacacgctgcccaaacgctggaccagcaagctgcacatcacctcgtgccgcgtctacgtcagcggcgacaacctcttcaccattaccccctaccgcggttacaaccctgaggtgtcgtataaaagcagcaacatgatgccgggcttcgactggggatgctaccccctctcgcgcatctattcggtcggtttaaacttaactttctaaatcttgtacgaatatgaagatcaaacatatgttcatcctgctcgccgcctcggtctcgacggcgtcctgcggattcctcgacgaatacgaccccaacgccacgacggtcggcaacttctacaagtccgaagccgacatcgtcacctcgctcaacggcgtctatgcgtcgctcacgcagagctactactacacgaacaaccactacttcaccgacgtccgctcgcatgacacggccgtgacggacagcggcgccaacagcggcattccctaccaattctacaactatacgcttaccgaggagaactcctacgtatacaaccgctacacgcagctcttcaagaccatttcgcgggccaacacgctgctcgcgcatctggacgacgtgagctattccaacggcgacgcgcgcaacacctacgaagccgaaatccgcttcctgcgcgcgctgacctatttccatctggtgaccgagtggggcgacgtgcccctgatcctgaccgaactcaagaccaaggacgaggtgcaggccaacaactaccgccgtccgaagagcgaggtctacaaggcggtcttcgccgacctcgactacgtactcggcagcccgctggccgacatgcagcccgcatcggagtgcggccgtgcaagcaaggctgccgcatggacgctctacggcaaggccaaactgcaatacgcctgcgacgaggatttcgcctccgagaagtcggcgtcgctcacttcggccatcgaaaagctcaccgccgcatggaacctgcggtcgttcggcgaactgtccgacatcccctacaacgcgatctgggacctctccacgcagaagtcctgcgccgagaacattttccagatcaactacatccagaacaacgccgacctcggctccacttggaactacctcttcggtcccagcaaaaccggcatcacctcgaacaaggtgggcctgatgcaaaacatgaccaccaaaagcgtctacgacgccttcgccaaggaggacgtgcgcaagaactacctgcgcgagacgaccgttgcgggcgtgacctactaccacaccatgaagtacgccgatctggagtgcggtgcgaacggctacggcggcaacaactggatcgtcatgcgttacgccgacgtggcgctgatgctggccgaagcctactactggcagggcacggagccgacggccaagagtttcctgaacatggtccgcaaacgcgccggactgggcgactggtcgggcaccgacctgcgtcagggcatctacgacgagcgccgcaacgagttcatccaagagggactccgctggcaggacctgctgcgcatgtactccaagcaggagatgatcgaacatttcaacgcgatcaaccccaacttcgggctgaaggacctgctgcttccgatcccctacaacgaacgcatcctcaacaccgagggactttaccagaatccgggctacggcgtaaaataaaccgacgacgtcatgcgattcacaaacagaatcatattgatcctctgggcgatcgcgtgcgggccgctcgctgcctgctccgacggcggcacggaggcccccggaccggaaaacgggactcagaccatcgtctggacgcccgcagttccggtcagggacgccgcagtcgtcttctcgctcgaaggcagtccggataacgtccgcagcgtgctgtggatgttcggcgacggcgcgaccgcgacttcgggcgcagacgaatcggccgaacacacctaccggacggccggcacctacacggtcagggcgaccgtcacccggctgcatggcccgatgaccgaactctcggccacggtcgccgtcgccgatacggaggccgcgatcgtcgtcagcaacgaccatccggcccggatggagcaggtcgccttcgcgctcagccgcatccccggcgtgtcgagcgtcgtctggaatttcggcgacggcagcgcggcgcagcgcgtgaccgacccgacgcagcgggtggaacaccggtatgaagccgacggacagtacagggccggcgccgccatctcctacacggacggcacgacgcagaccctgacgcagaccgtcacggtcgaaggagcttccctgagccgctcgtgcctgaatttcgacaccggcaaaatgtggatcatggcccaccgcggcaacttcaacaacggctacgatctggcccccaactctatggcggcgttccgcaagtgcgtcgaactgggatgcgtggacttcatcgaaaccgacgtccagatcaccaaggacgggcaggtcatctgtctgcacgacaactacctcaagcggttcaccgactacagctcctatgccggcgacgaaggctacgtcatcaacttcacgcgcgaggagctgcggaaattccggctgaaaaccaccgacggcaaggtgaccggcgaacagattccgacgctggaggaggtcctcacggagctgcgcggcaaggtctggttcaacctcgacaaatgcggcagcgacgacgtggacatcgccaaggtctacgaggtcgtcaaacgctgcggctgtctggaccgggtgcagttctatgtcggaaccaacagcgacagagccgcttggctggcccgtcaggagcagccgggaatcatcgccccgcacgccaacaacgcctcggcgctggccgccatgtcggcattcgcccccgtctacatgatccagacctcgacgggctatgtcaacagcgcatggatttcgtcgctcaatgccaaagggctttcggtctcgaacctgctcgacgacgagggcgcggccttccgcaacggcaacaccgtcacgatggacggcttcgtcgccgcgggcctgcgcatgatccagtgcgactaccccgccctgatggacgaatacctgagagacaaagggaaacgctaaaccttaaaatttcaaaaaatcaatttcaatgaaaagaatactatcatatctgagtatcgtgttgctctccgcatcggtcgcatgttcggacagcagcgagatggacaaggcctacaactcggtcatcactcccggcttcacgttcggcgaagaggagatcatcgcgggcatcactccggtcaccttcaccaatacgaccacggcggaagggacgaccgtttccgaatacttctggcacttcggcttcgccggagagggcaactggtccgaggaggccgctcccgacccgatcgtctacaaccgtccgggcgactacacggtcaccctcacggcatggggcgccgacggcaaccgcgccacgacgaccagaacaatcaccgtccttgcggacaacgtgctgccgacggccgacttcagctactcgccccagatgatcagcatcggcacgaccgtgacctttacggacaaatcgaccgattccgacggcgaaatcgtgtcgcgcgaatggctcttccccgacggcacgacctcgacggacatcaacgcgacctacacgttcgaacaaatgggcatgttcaacgtccagctgaccgtgaccgatgaccgcggcggctcgaacagcacctccaaggccatcaacgtccgcgcaggcgacgtcaacgccttcacgctgctctggtccactgcggtagcctccgccgatgcgctctgcgcggcgagcgtcgtggccgcgagcgacatgggctatatctattcggtatcgggcgacggcaaaatggtcgcgctcaacaccgacggcgccaaggtatgggaatacgacgccatggcaaaagacggcgtatacctcaagagcgaaatctcctatccttcggtggacaccgacggcacggtttactgggtggcgcacggatacggcggctcctcgtcggcatcgctcgtctatgcgttcgacggcgcgacgggttcggtgctctggaagaacacgacggcctacgccccggcggcgcgcatcgccttctcgacgccctgcatcagtccgagcatggtcatcgtcggcagccgcggcaccaacggcgcgatccgcggattcgagaagggcaccggcaagaacaccgctacggccaccccggccaacggcggcggcacctccggcacgatcgcgctcaagaacggcgtggtgatcttcaccaacaccgcccagtacggctacggcatcatggttcccgacgcatcgttcgtctggtcgccggttccgacctccgacacgttcgctcccaacaagattctctcggccggccgctgccagccctgcgtcgatgccgacaactgcgtctaccttcccggcatcgccgaaggatcgggcacttggaacctcgcgagcttcgactgcacgaacctcaccgcatcgtcgaagaagaccccgaaatggagcgtgaacctgcccgacggattccagcagacgggcgcatcgctcagcgccgacggcacgacgctctacatcgtcgccgacaaggccaccccctcggtggtctacgcgctgaacacctcgaacggttcgacccgctggtcgtacacgctcgacgcggcaagcaacagcatcccggccgtcgataatctcggccagatccacctctgcaccaagacgggcgattacgtcgtgctgagcgccgagggcgaactccgctacaaggagcatctggccgactcggtggacggctcgccgacgatctccgaatggggctactcctacttcctcggcaaggactcggcggcaggtgcgctcaaggtttactccgtagcgctgcccggcgtcacttcgcccgcagcttcggcgtggtcgcagtacggacagaacgcacgtcacagcaactaccagaaataaccgaatgtagaattccggaggggcggcggtccgcagggccgccccgccttccgggaaatataaggaacctgaacatgaaaaaaacaataattctcgcgatgttcgcggcgctctgcaccctgacagccggatgcgccgacgatttcaaaacggtactcaacgacaagtactacgaggacgacacgccctcccgcgaacccgacatcaccgagcagacgctcacgctcggcagctacaacctctggatttcgagcaagggcacgggcgactacctgtggaccaaccgccgcacggtgctggcgcagtcgatcgtcaaaaacaaatgggacatcttcggcttccaagaggccaacggaacgatccagaacgagctgccgacgctcgtcgggcagcaaggcggcaaatacgaatggtggttcgtgggccgcgactcgcaggacggcgtcagcggcgaagcgctgggcatcgcctacaaccccgaacgtttcgagctgaccgacaagcacttcttctggatttcgcccacgcccgacgaaatgagctacggctgggacgagctgggctatcaccgcatcgccgcctgcgccatggtgaccgacaaactgtataacaagcagttctttatgatggtcacccacgccccgctgggcgccacggcgcgcgccgagggcgccaaactgctgatcgagcgcgaaaagatgtataaccccgacggcatcccctcgattctggtcggcgacatgaacgccgccatggacgacgcctcgtcgaagacgctccgcacccattggaacgactcgttcctcacggtggaatcggatttcatcagcggtcccgtcggcaccttcaacggccacaaaatcacagccgacctcacgcaggccacggcgcgcatcgactacatctactcgcgcggcgacgtggagctaaaatcctacaaggtggacaacaccgtttacggcaacatctacccttcggaccactgccccctgacgattcagttcgacaccgactacgagaaacccgcacccgacgtggtcgagggttccggaacggccgcggacccgtggcagctcaactccgtgagcgactggaacacggtcgccgcgtcgatcaaccggcaggccgaagacgccgtctacacatcggcggcctactaccgtctcacggccgacatcgacttcgacaacaagaacctcacgccgatctccttcacggccgacaacacgatctacttcgagggcgaattcgatggtgcgggacataagctcctcaatgtgaagatcgtcgctccgggcaaatcctgcggcgtattcggcgccaacaagggcacgatccgcgatctggccgtcgaaggtgcgctttcgaccgaattcgagatcgcgggcggcatcgtcggcataaacgccggcgtcatcgacggggcgaccttcaagggcgacatcacgggcggcaccggagccaagaccatcggcggcatcgcgggccagaacaagggtacgctggtcaactgcgccaacctcggcggcacgatgaagaccgacgccccgaaagaccccaacatgggcggcatcgtcggccagatcgccaaaggcgacgacggcttgggccgctatgtcatcaactgctacagccgggtggaccaactcgaagcgaaacacaacgacgtcggcggcatcgccggcatcgtcagcgacgacagcttcgtcatcaactgctactcgaccgtggaaaagatcacagccaacagctcctacgcatcggtggtgggttacagcaagaaaggcaacctgcagaacatctacggcaactcggcatgtccgtccaagtctgcggcgaactccgccgtcggcagcgacaaggcggccggaacggtctggaaaaagacgaccttcgccctgctctcgctcgacgagatgaagtcgggcgccgtcaccgtaccttcgagcggcgagtcgtgcgcaaacttcgccgcagcgctcaacgccggcgcaacgctcttcaacgacaccccggcggcaacgctgccgggcaagcccgacgtcgtcctgcgcaagtggacggcatcggagagctatcccgtactggaaaaataactcttcaggagaaccggaactttccggttctccctttttaaaccgaacgaaatgaaacgttacctactcatcctctgcgcaacagccggtctgtacgcctgttcgcagccggcggccgaaacgacggacaaagcccggttcgtccgcgcggaactccacaacccctcgtcacggtacgtcgtggtggtctcgcaccgcggagactggcgcaactggcccgaaaactccatcccagcgattgaatcggtgatcggcatgggggtagacatcatggagctggacctcaagctcaccaaggacagcgtgctggtcctgtgccacgacaagacgatcgaccgcacgaccaacggccgcggccgcgtgtgcgacatcacctacgactcgatccggcgctgcgtgctgaaaaccggccacggcgtgaagacctcgctcaaaatgccgaccctgcgcgaagcgctcgccgtctgcaaggaccgcatcgcggtgaatatcgaccaaggctacgaatattacgacctcgcgctcgccatcaccgaggagctgggcgtcacggatcaggtgctcatcaaaggcaaacgtccggtggagaccgtctctgcaaaattcgcggaatacggacacaacatgatgtacatgccgatcatcgacatcctcaagccgcagggcagggagcttttcgaggaatatgcctcgaagggcgtcgtcccgctggcttacgaagtgtgctgggacgactatacgccccaagtcgaagcctgcatgcggcaggtcgtcgcaggcggttcgaaactgtgggtcaattcgctctgggactcgctctgcggcggtctgagcgacgacaaggccttcacagaatcgccggacgaggtgtacggccgcctgctggacatgggcgcttcgatcatccagaccgaccggcccgaactgctgatccgctacctcgaagcgcagggacggcgcaaataaccgagcgacatgaacaaattactgatctgcatggccgtcgcatgcgtgacggccttcaacgccgcggcgcagagtttctcggccgcgacctacaacatccgccagctcaacgccaaggacacggccgagggcaacggctgggagcggcgtctcccggtgatctcgtcgctgatccggttccacgacttcgacatcttcggggcgcaggaggtcttccacagccagctgcagggcatgctcgcggcgctgcccggctacgattacgtcggcgtcggacgcgacgacggggccgcaggcggcgaatactccgcgatcttctacaagcgcggccgcttccgactgctcgattcgggccatttctggctctctgaagacccctcgaagcccggcaagggctgggacgccaaatacgtccgcatctgcacatggggccggttctatgacagacagagccgtcagcggttctggttcttcacgacccacaccgaccaccgcggcgaacaggctcaggccgagagctgccgcctgatactggcgaagatcgaagagttgtgccgcggcgagcgggtcatcctcacgggcgacttcaacgtgggcgaaacgagccggagctacgcgatcctgcgcgactccggcatcctgtccgacacctacgacacggccgaaatccgctatgccgaaacaggcaccgaaaactggttcgaccccgacatcaagaccttccgccgcatcgactacctcttcgtaacgccgggcttccgggtgctccgctacggaatcctgaccgacacctaccgttcggaaaacccggacggcggggagcggaaattccgggcccggactccatcggaccacttccccgtgcaggtcgaactggaattcacgaagcggtaagactccgattaacctgataacgcaaccaacctgcttatgtcaatactctcatttttcagaaaaagcgcaccggcgccgcgtctgccgaaggacgacgacgccatgatgcgtctctacaaaaaactccgctggcagagcttcatcgccggcaccgtcggctacagtctctattacgtctgccgcacgagtctcaacgtggtgaaaaagcccatcctcgaaagcggggcgctggacgccacgcagctgggcgtcatcggttcggcgctgctgttcgcctacgccatcggcaaattcgtcaacggattcctctccgaccacagcaacatcaaacgcttcatggccgcgggtcttgcggtatcggcggtcgccaacctgctggtcggcatcctcggcttggccaacggaggcggcatcgtcggcaacatggtgctgttcgtcgccttcgccgtcatgtggggcgtcaacggctggagccagtcgatgggcgcgcccccggccatcatcgccctctcgcggtggtacccgctcagcaagcggggcacctactacggattcttcagcgccagccacaacctcggcgaattcctgtcgttcctgttcgtcggcgcggtcgtcggcttcttcggctggcaatggggattcgtaggctcgtcggtcgccggcgtgctcggcgtactgacgatcgtactgctgatgcacgacacccccgaatcgaaagggctgcccccgatcgaggagctgaccggcgaagagactcccggcacgccccgcgaccacggcaaaacttccgacctgcaacgctccgtgatccgcaatccgctggtctgggtgctggcgctctccagcgcgttcatgtatatcagccgctatgcgatcaacggctggggcgtgcttttcctgcaggagatcaaaggctatacgctggccgcggccacgcaggtcatttcggtcaatgcgctctgcggcatcgtgggcacggtcttttcgggctggctctccgacgccttcttctacgggcggcgcaacgtgctggccttcggcttcggcgtgctgaacaccgtcgcgctctgcctgttcctctactccggcgacgggctggtcgtcaatatcctcagcatgattctgttcggcgtggcgatcggcgtgctgatctgttttctgggcggcctgatggccatcgacatcgtaccgcgcgaagcgacgggcgcagcgctgggaatcgtcggcatggcgagctacgtcggcgccggcctgcaggatatcgtcagcggctggctcatcaactccggcaaaacggagctggacggcgtgacgagctacaatttcgacgcggcgatcgtcttctggatcgccgcgtcggccgtatcgttcattctggcgctcttcgtcgccaaacgctcgcaccggtaagccgcacacaactcatcctccgaatcaggctgcaagagatcccttgcagcctgattttttaccccgcggtccccttttccgcactttcgccggcataggccgatcgttcaatttataaattctatgcgttgatttttagaaacatccggttcgttgaatttatttgcacgtaagaaatccgcgctgtttctttgctttcggaacagaaaaacagctccatttttcagtcaaactaaaaacgcaacaaagatgaagaaaatcattatcgtactgcttgcagcagctgcaagctttacggcggccgacaaagcttcggcgcaggagaaaggtttgtggatcggcggcaagctgggctactggcacgacaagacggaaggcgtcaaaaccgattcgttctcgatcgctcccgaagcgggctacgatttcaacaagagatggtcggtgggcgtggcgctcggttacgagtacctgaaagtaaaggacggcggcagcgccaacgtcttcacggcgtcgccctatgcccgttacaaatattataacaaggggattctgtcgctcttcctcgacggcggcgtaggcttcgcctgctgcgatcacgagggctttcaggccggtattacaccgggactgagcgtgaagatcaacgagcacttcagcttcctgacgcaggtcggcttcctcggctaccgcaaggactacttcaacggcggcagcggcgaggccttcggcctgaaactctcctcgtccgatctgaaattcggattctactacaaattctaaccgacaacgaggatattcacgccgcgccggtcccgctggcgcggcgtttttttgacaacacaaatccgctgcacatacgcgcatgcccatcggacctcggccgtcggttcaccgtgcagtctacccgttccacgcaaacctcatgggaagcccctccgccgagggcatgaaaaaagacagccgcactcctgcaactgtctgattttcattggtgggaacaagcggatttgaaccgcagacctcctgcttgtaaggcaaattgcctaaaccacctaatcaattagcgggctttatgttagctaatgtatgtaacttttttgcaaaaccggtaataaaaaattagtataatatcaacaattaaaaaaaacgccacaaacacctacatatcagctaattgcgcgcctattgcgtgggggggggtgttattcagacctaattttcgctccaattcttctacatgaatttttaaccgttcattttctcgaatcagctgttcatcacgatgaagaatcatccccacagtagtatcagttgcaacattatctacgacctctttatcaactttcattcttcccttgccctgcatcaaccattcaatcgacacgtcagggaatgttgcaataaatttcgccaatacatcttcagtaatacccgtctttgattccagtgtaccacgagacacgcctattttcgcataaaattcgcgtttgctaatattaagattatcagcaaattgcaaaattctttgtttgatcggcgaaatcttttgctctttttcttgcattttggcgaaatcttttgcaactttgcattgtgatacatgcgtactacattcaagtaccacaataaactgggtaaagatataataaaaaccactgaaagccaagcgaaatgggcaaaaaaatatcattctgcgaaataccaagcacagctggctgggaaaaatacctgaaaaatctggaagttgatgcctccctgagttttcaaaacattgacaatactgcagccaacgcccgccaagcgatcaagagatttctcaaaaaatggcccggaagaaaattttcaactaaaacgtgtaaagaagatcattctttcacgatagtaagggtaaaatagcatggcacaggaaactatcaaacgacgtaaacgcaaacgcggaagcgaaatgtccatgaaggaactccagcagctcgaattcctaaatggcgtacaggctgcgcgatactgtggaatatcgcccagaacattctactactacctcaagcaaatcgacatacagaagtacacccgcacaaccatgtcaaacggggagaaaatactctaccgtcgaaatgagctggatgaaaaattgcgacccaaatctttgatacagacagttcaatttatacatattcaggagcaaaatcaatctctgaccgcaaaaaagagaaaagctcttggccctcaaggtaacgccgtgacggtcttacagagggcagcgaagtagatggtcacaattcgcgcattggtcgtaagtacaggttctcacgagcgatgtatgacaaggccaacaaacaaaacgtctacttcggacagcaagggcgcattgcagaaagttatctcagcgcccttgctttataaaaattattcaactatgcccggaaataaaccactgacacgcgaagagttccgagcctacatgaaggagcgggatcgcaaactcaaagcctatgacactgccgaaaggacagtgaaggtcatgtataaaagtctgtgcccggcttgcgaatacaacgcaacccatggtaagaaaatcatctataattgcccaaattgcaaagtcagatattggaataattgcagtaagaatcaggttaagaacggcgggatattatccgcccttcaaagcaagtatggaaatatcgaatgggtcaaagcctacaacccagatggcacgctttactatgagtggaaacgccacgagcgtaggtacgagcaagatattgatggaagatgggttccaaaagattaataaaaaatattgcgttatggctgctaaaacttgcgtcacacagaatgaagtgcaccccaaatattggacggattagtatttgtttagatggcatgagttcggtattgtaccgggctcatgttgtttaagtatttctttatccgcttgttattgtagtagtcgatatattcttccaattcttttcggaaatggtctatggatgagaatttttgcaaatataataattcggacttcaataatccaaagaaactttccatagcagcgttatccagacagttacccttgcgcgacatgctctgtgtaatacctttctgtcttaaacggagctgatactgcttcatctgatactgccagccctggtcggaatgcaagacaatacccggagaatccggtattctggcaaacgcatcgtccagcatcttcatgatctgcataaagttagggcgttcagctattttatagctaataatctcccggttatataagtccataatcggcgatagatataactttacgccgcaaaccgaaaattccgtaaggtcagtaacccacttctgattcggtttttcggctgcaaagtcgcgttgcagaagattgggcgctatccgtccgatctgtccttttgtatgaacagtatttacggagcctgacctgactttttatcccgcaaatattcatcagcttaagtacggttttgtgatttatcgcatatccgatcttattcatttcaacggtaatgcgccgataaccataacgccccttatgttcgtgatataaccttataatactctctttttcgcgagcatatttatcgggttgttttgattttctgaagtgataataaaatgtgcttcgcgccatccctgcggctttgagcaatactgaaagccggcactgcggccttagtccttcgatggcttgggctctttcccgctctcgcggacaatgcgctcctcgactaaggcctgcaatttttttaagtaagcattctcggcacgaagatactccagttccttaagcaactcttcgtgcggagtcgttttgagtttgacttttttagtcttcgatttactcatggccggcctccttctttgcggtttacgccgcaggccttcagcaccttggttttgatagagccgctcccattgacgaataacaaaagggcccggaatgccgaaatgcactgctgtctccagcaaagatagatgattttggtgcatatgcttcaaaactgacaacttaaattctgcactgtagctaccgtggcgcagcttaaggccggcaaggccatggcgctcgaataatgttacccacaagtgaacttgcgagcggccacagcccaagtgacatccggcttccctaaccgaaagtccgccttcgagtaccagttttacggcctttaaacgaatctcataattatatttcataaaaaacaccccaaaagtgtccaacttttggggtgcagtacagaacaaggtcacaataaccttcagcaccccagaggagatagcaactctcaatcttatcaagggaataactttctcccgatcatacaaaaaggcaatcatgcagatggtcgagacatacgatgcgctctcgaaggagtgctctaacctgaaagcagcgtctcataaataaccgctattgacgaagccgtgaatcacaagataaagacagacatcgggtattgtgtggtcagcgacgattgtgcgctcgacgaagaagaactgaaaacattggctgccgacatcaaaaagcaaccgaagctcacacaaccgaatttctttatcgacatgcgttacgactataaattcatccagttgcaggcattgttgaaaatcacggaactactccaaccggtaatccaaggtaatattaagaacaaaacatcgggaatcgccaatatggactgcgtaagcgtataccaagaacgaaacgaggtggaaatcgtacttcccctcgcctctttcggcgtattgcgacattattacgaagaattacgggccgctttgattgccatgcctactatccaagtcgattaccccaaatggtcacatcagttccgtaaaacactacatggcaaggggccgctctgcacgtatgtagccataagtcgggacgagaagaacaaacgccgggaattggtacattttttcttcccgatcgaggtagctgcatgcatggtcactccccagttcggctttacaagattgcttcagcgctccctcgaaaaattcaagaatatctatacaaccaaaatctatttgcagatttgcagatcggcagatgcaggcaaatgggtcgtaagttattctaccctccggaagatcttatgtgtcggcaataaattccggcgctactacgactttcggaaccgcattctcaaagaggccgaaaacgcactccgagggaactctaatcattggttcggtctggctgaatgtttcaagaaaggcgagcaagatccttaccttttgatcttcaatatctattcggcaaacaaccgacaaaacagttacgacgaatataaccgactccgggataagatgctctcgacaatggttgattccatgcatattacgagagctacggcgctggcgcttacgcggaaagtcaatatccgcaattacaattacgtctggcgcaagcataacctgctaatagccaacatcgccggcaatgacgaagtcctcgacaaaaaggcatactatgtcagcaccatggagcgcatcatcgaaacggagaaatacagcaaactcgcagtacaacaagatcttttttaataaccttcaaaaaccgcttactatgaaaacgatcacgatcacaaatctgaaaggcggggttggcaagaccacaaccgcgatcaacctggcgcaccgcctcgcatccgaggacaagcgagttctcctgctcgacacggatcaccaggccaacctgtcccgtttcttcaacgcccagtccgaaagaaacatctaccaactgttcatcggtaaggctgctccccaaccctacgcaatctccgacaacctgcatattatttcttccgacatggaaaccgccacaatcaatttcaggttgataggccaaatggcctggcactctgttctgagaaataaactcgtgtccagtggctttacagcactatacgactactgtataatcgactgcccgccggccctcgatatgatagtaacgaatgcactgacggcggcagattacgttttgattccgcttacatccgggcagtttgcgtacgatggcctccggaacatcatagaccgcatcgacgagatcaaggagagcgccaacccacatattgaaattctgggaattctgctgacgatggtgtccgaacgcaccagagcagtaaaaacggtgaaggatatgctcaaaaagcatggtctggacatcaagacctgcgaagctcgtatccgtcaatgcgaggccttcaagcaggccgaactcaagcatatctcaatattcgattacgaccccaaatccaacggggcctgcgacatggagacatttttccaagaaatacgcccgcgtattgaaaaataaagagcgatatgaaatcagacagcattttcaagtcattagacgctattgccacggaaggtatttcccgcaaaaaaagaacgctctttgcgaaaaaggtcacgatcgacctcgacgagcaacacctaatcatcctggacaaacgcctgaagatggccggctaccatggatgtatgcggggcgtaatctgggaagccctggaactccttgcagataaatacaacttacaaaataacgattaaccatgactgatagcgaatatctgagccagagaaaagaactggagaatcgtattgcgcagctcgatgccgcgcacctcaatgaccgcgaatatatggacggcgatcatgtccatatcgacataggctggaaaagtgtacgcggggtgatttgcggctgctacatcgaaaaggctgacggaagtatacactactactatcacccgctgaaaaaggatggtactccggggaaagctgtcagatcgacatttgtgggttgcaaacttacgaagctatgaatatcgtgtatctctgcataatcaccttgttcgcagggcttactccctccggacaagcaaaaatcgacaagttgctgaatatggcttcgaactatcaacaggtcgaaaaaaccatcatgctcctcatgcagccgaataaggtaatcacccggataccttgcatctcgccgttgcaggccgaggatcttcgccatatcccggtaagttcagcatacggccagcggcttcatccgatcctgaacgaatacaaacatcattcaggcgtagaccttccgggaatactgggcgaacgagtatatgctacggccgacggcacagtggcggaagtcggagaaaataaagtaatcggaaaattcgtcaagctaacacatgcctacggattcacgacggtttacggacatttaagccaaattaaggtcactgacaatggaactgtccatatcggtcaggtaatcgggttggtcggcaacaccggccgcagcaccggcccgcaccttcactatggagtaaagaaaaacggcaaggaacagaatcccctgccgtattgctatctgtacctacactggctgaaaatgttgaattgtgaagggaagaattccgctactttagatcacgcctcttccgctcgatcgttgccatccgtttcttcacagtgcgccgacctttctccacgtagttcttatacacggcatcaggaatctccacgatttcgtctttgtgagctgcaatatattcctcaagcagcttactcataatctcactattcgaaacggttatgttaccctgacgaataaaagtatatttcaacgtaaaaaattttctgtgctcttcttccgaaaccgggaaagtcatttgtatcatatttccagcgttttgtgcaaaagtagaaaaaaataacagaaaagtaccggttctgcccacattattatcattcaagataataagttgattacacatcaaaataaataaatgccaaaattagaatatatcacattacatacttgtattttatacataatttatggttataacgtattttatttatttaacatattatacataaatatacgttaataaattgattttctatatatttgtcgcataaaacagttgattataatgaaacgttttctactctttttcatcctaatatcagcatactcaacgacatacgcccagttctcgtccgtatcaaccaacatcgtcggatgggctgccgggaacataaacgcggccgtcgatctgaacgtgaacttgcacaatacgatcaacattccggtatcagccaatccgctcaagttcggggatacccaatggagccatgtcgtcctgcaaccgggatggcgacactggttcgtcgagcgatacatcggacagttcgtctccccctcgctgttttatgccaactacaccataggctacgacaaacgcaccttcaaaggcaacgcctacggcatcggctgctcatggggctactcgaagctcctgagtacgcgctggaacttcatcgtcgagatcggggccggtatcatctataccccctacaccgagaagctgcggccgaaatatatcggagagttcgacgatgagtacacctaccatcaccgacgattcctgctcgtcccgatcaaatgcaacctgtcattttcctatttgttctaattcacagatcccatgacaacaacttttgaaaattccaaaggatacaaagtactgccattgtctgccgacgaaatcaaggtatggccacgtgccaagacctgcgaccgctgtggccggaaaatcagttcaaacgggttctacgtaggagccgtcaatctcatgtattgtcccgactgctatgaggagtggcatgccacggcaccggagaagcaggaacttcaatgtccgcgggagaactcgcatctggcaaaggcaaacgaatatatcgccgaaggattatcggacatcaaatcaactaagaaatgaaaccgtatagaacactcgtttacatagttctgaccgtcctgatgctctcttgcgccatgacgcactccttgcagcgcagcaccccgacggccgacatccatctgcccagcaatggccccgtggagacacccgaagtagaagacgttgaacgggctgtcacgcaaatgcgaaaaatctcgatgaacggcggccgtgacagcgcctatctggccgaggtcgaacgcgactccacgggagaagtcaccatcaaaggcgagaacattcagacggtctacatcgttgccaagtcgaaaaccgtagctgaacgcaacggggagattgcgatcgacttcatcgtaggcatacccgctgctctccagagcagcacgtgggggttgtcgctcaccccgatcatagagaacaatgggatggaagaggcgctgcaaccgctctctatccggggtgagcttttttccgacatccagaagcgccagtactggcagatgaacaagtacctgaaccgcatgctcggcgactcgacggagcttacgtccaccaccggcctggccgcgaagtactacgaagcctacaaccgctacatcgccggcggccagaagcgccgggccgacaaactggagtccacctacaaacaaacgatctcgttcccctatttatccgatccgcggctcgactccgtgctgatccgcaaaggggagatccggtattactacacccagacctaccggccgacgaaggataccaagcgcctgcacctctttttccgcggccgcgtcgacgccatcgaccgcagccgctacgacctctcgaacagcgacacgcttacctacaccgtgacatccatgctctcgctcctggacaacgagccgcgctacatgctcaagatcatcgacaagtacgtcgaggtacgcgaccgcaactacatcaccttcccggtcggccgtgccaatgtaatcgacacgatgggccagaaccatgtgcagcttgacaaaatcgagcggctgatggacacgcttatcaaccagtacgaattcttcgtcgattctatcaccattaccgcttcatcctctcccgacggttcgatggcgaccaacaaccgtattgccggcgagcgtgcccgctcgatcaaggagcgcttggtgcgcaagttcggccacgaggtcgatacgctgatccgaacccgctccatcggcgaggactggacgctgctcaagcgcctgatccgacacaacagcgacgtgcccaactgggaaaagattacggacatgatcgaccggagcagaaacctcgacgtgacggagcagcagatccgccagcagttccccggagactacgccttcatgaaggagatcctctatccccagttgcgggccgtggacttccgctacaacctccgccgcgtcgatatggtcaaggataccgtcgtgctgaccgtactcgacacgacctacatgcgcggggtgcagcaactccgcgaccgggattatgtcggggcgctgcgcaccctgaacgactacaagtgccagaaccttgcgatcgtgctgctctcgctgagttacgacgaggcggctttcgagattctggagcaactgccgccggccgagaagaacccaaaaaccgattacctctcggccatagcactatcgcgcatgaatcgaccgcgcgaaggactggagtattacctcaaggcgattcaggcagacccggtgctgaagttccgcggcaacctcgaccccgaaatccagatactctataagcagaacaacgtaaaatctacggcgtatgacaattgagttaggtgtattcgacatcgtgctttatacgcttctgctatgtacaggcaccatattatgctacatgctaccgcactcggtctcctttcgtcgaaaaagctacgaggcgatggctctcgaccttttggagcagggaaagatcaaggacgcagcagacatcatggattgcctgcattggtggcatttcacaaaagagacacacgcactggccgccttggtatactacaaggccgggcggatcgacgaggcaaaggaacacttggccatgatctgtaaaccccgaaatatgctcttcctgtatttggcatccaacgcgaagctcaagacgctattcgacgaactcaagaaacacaacgaataatatgaaatacctctgctacatactcacggggctttggctcgcaagccttctccccggctgcgagatccacgacgacatcgacgtcgatgtgaagcgcaaggccatcgtatacctgcgctacaactacaacgacggggagcacgacaccatggacgaggtgcagaccctgcgcctgttcttcttcgacctgaagaccggcaggcagtaccgcgacacgacgcttacgcgggacgaattcctgaccgataccggagccatgcagacctacatttccaatggagaatatgggattgtgacgcttgccaatgtagggcatggctcctcggtgtcggcagacaacatccgggacgctgcgatcaccttcccgggtacgggtgccgacccgcttttcttcaaccgcatccagacgccgatccaaaagggcgactcgctgcgcttcgacatcgacctgttcaagtccgtttacaaggtcaacgtccgtgtcgaagggatgcagaacatcaacaaccccgaagatttctatttcgggctgaacaactacgccgctctgagttttgacaacaagccctgcggcggcttcagaatgtatcgtccccaactggcccgcgacccggcggccggcaccatgtcgggatcgttttacacgccctactttccttcggactcgccaatctcaatcggcatctataccgatgatcccgcctcgatttacgggcatgaactctttgtggccacgatacaacgctacatggaaatcgcccctaatccgggacacgacgtcgagatagacatccgcattctcctgaacagagccaatgtgacggtgattatctccgactgggaaggaacagtcattcaagaagaacatttcggagcataggctcgaaaataacttattttctcacttaattttttaatcatccctctatgaaaaaattttttatgaaactgaccgcaatcgcggtaatgccgatgctgcttgcagcctgcacgaaagacgaagttaatcctacaccgaccaacggtggaaaggaaggcgaaatcgaacttatcctgaaaaatgaaagtgtagctgacggaacccgcgcctttggctccggcactaccgaaagttgggagaagtcgatctcctccgccgtacttatcgtctacaacacctcgggcacgcaaatcctgcgccgcgtactgaccgccgccgaagtgaacggctcgaccacgacgccgatcaagttcgtacttccgggcgtgagcgccgatgcctcgtgtgatttctatgtcgttattaaccgtaacatagcggataacatcaccaccaaggccaagctgctcgaagagttggaaagcgacatcgcctcctacaacggcacctacgcaaacgtcacgacaaaggccatgcgctccggaggattcgcaatgacaggaaccgtgacggcaaagatcgtatccggcaccacggccgtaaccgtgaccgtaaagcgtgtcgtggcaaaagtcgagattcagacctccatgaccgactcgttccgtaccaagtacggcaacggctgcgtcgaggtcaagaaaattacattgagcagaggagccgagaaatcttatctgattgaccagacggcgagcaaatatgcaaccgtaagttcttccttcacctcggcacaggacgcctactgcgacaagaccggagcgtcgaaaacgaacgcatacaagtacaacaaccttttctacatcaacgagaaggccgcagccgctacgggatcgcgaataaaagtagtcctcgatgctatctatgatgctgacggcaacctctcgactacgaccgaccaagtaccgttatcctatgaaaccgaactaacaggcaccaccgacggaaagatgcttcgcaacggttcatataaactcaatgtaaacctcgacggacttaccggtaaagacatgacgctgtcaatcgccatagccaattgggaagcactttcaacgcagaacgtgaatgtaggaaagtaatctatttcatcatccccgcattgtcggggatgattctggccaccgtagctcaattgaaagagcacacctcccatcgggagctgaggttgtgggtttgagtcccaccggcggcactttcaccaaatacattgtgccatgaaaatacgaattattctatccttactgcttgttattaccatcgcatgcagcaaagactccacagaaccggagactctcagcccggaatctacgatcagcatggcactcgattaccagagccgagaatacgagttaggcgaagtaatcgaggcaacactgacaatcaccgaaaagaatccggcagcagactatttcctgttgaacacctcctgcaacggaggtaaggccgtggcaacagtagacggccatgaactgcaatggcaagcagaacagcagattccctacgaaattgtcaatgacgaattctcctcgaaagtgctgcacctgaagataacgccccaagccgggacaacagccaaacagccgttcaacttcgggatctatgcaatctcggacggcgggacaaaggtcgaaaaaagaatttatgcagtgagtgtcaatactgcggaaatcataacgaatgtcgaatgtatcaccccgacaatcaatttggaacagcagtgcaaatttattttaacagcaaccaaagagaattatgccggtgactttttcgtacaactgtcaactgaaggcaacggatttttcatactcgaagacggcagtgccggaaatcggttctactgccctgcagactcccataatatgctctcataccagccccatgaaaccggcttacacaaaatccactgcatagtaaaggacgacatcagtgtttccgaagtggacatcgaagtcgaagtcaaggggattaacggaagcctcacgaatcccgagcccggcgtatatatttactgcaattcactctactacccaagttcggcatggcaccaagaatggaaagaacaagctgaaggtgtcgcaatcatcacggaggaatgcaggtttctgatggccccggatcccgttatcggagattggggcggtggtgagttcacgagtgtttctgacctcacggtcatgcaggactggagagaagccaaattcgattataacggccgaaaaaacacagaggcattactcaatgccaaagacgttatgcggaaaatcgagttcaccgaaaaatgttacaactacaataaagataatccgggcaagtggtaccagcctgctgcgggacaaatgtatctgatccgtcaaaatctggacgaagtacaacgatgtctgagcttgataggtggccgaaaactaaaagccaacgagcattacatatcctccactgccgcagatggattgcacctttgggcaatcagtctcacacaattcgaacgaatatattttttcctctacgaacccgacaaccggacatatcccgtccgcgacttgtagacggaagagctgtgataattcaaacgactaccctatgaaacttttcagaacgacactcctatacctctgggccatggcagccttcggttgcggaaaatccgaatatcggatcaccgagcctcggccgacgctcgaagtgacggccttgcaggacgtctacatcatcaaccagccggcgtatctccagctcaaggtctcgcagcaggggtacgacggggaatttcagctctcggccgtactcagcgaaggggcctgcgagctctcgatgcagggcagcgacctcccgaccgacggcacatgggcgtcgatgtccaacactacggagatcctgacgctcacgccgacgctggccgggccgctgcgcatatccttcgaggtcaaaaccaaagagggcgagcagtccggccgcagcttcataaacttcaacgttcagaagagtcccgcactcgcactggaagtcgaataccccgaaacggcatccgtcaccgagcggatcgagctgacgatgctcctcacaaaatccggatggacaggggcgatccccgtaacctacacgcaactggcaggcagcggcacgctccagtacggagccgtggccgtcaccccggccgaagcgttctccgtgccggccaatagcgaacagccgctctactacactgccgccgagcggggcatgcaccgtctccagttctcggcaacggacggatataccacccaattcaagactcttgagatcatcgtaacaaactgacgacaccatgagaacgaccttattttacgcattggcgctgttcgtatcggccggatgctccccgtcgaaataccggatcgtcgagccgaagccgcaattatccctgtctaccgtcgcaacggtctgtgaactgggacaggccgtaagcctctcgctggccgtctctcaggaaggcgtagatggcaacttctccctctcagcgtttatccgccaggggcaggccgcaatcacgctcgacggaagcgacatggacacatcgggacaatgggtgcagctctcggacaggaatgcgcgcctcgtgattacaccggcccaaacgggagatctgctcgtaagttttcaggccaagtcacctgatggcgaagtcagcgaacagcaagacctgaaggtcacggtaacagcgccatcagaaatcgcggccgaagctgtctgcgaagcgaagatcgtaaaccccgcggccgatgcccggattccggtgcagctccacattcaaggtgttccgggcgcagacgggaaattcatcgtaaccccgaccgtcagtctgggcaaaggcaagatattcctgaacggaaacgccgtgaacggccaggcttgtcccgtagatgccgacgtgacgttcgagtatgcacccgaagagatcggcgagcagattctcgaattcgagatcgcggcagggaaggcgtcggcaaaagcacgcgcatacatggacgtcgtgaaaaacatcgtcgtgacaagcgtcgtcgagggctgcttcaccatcgacggggccggggagcacaacgttgaaggcgagacggtgacgctcgccctcgtaaacgaagacctcttcaacttcgaggtcgagggctggtacgacccatccgggcagctcctgtccggcgaggcgacctatgcgctcacactcgcgcgcgactgcatcaccgacatccagctcaggctcaagccccggactgtgaccataacccggcagggaattgcccggatagaatttcaatatctcgtcatggaaggcggacgtcccgtaccgaaggtagcctacgattaccgcacgcagtattcggccgactacaaggcatccgagccggtgaagttctactacgaggagtacaggctcgacacatcgaagatcccgcccgtaggccagaagtccgccgggatgccgacgatacccaaaggggcgacgaaatcgacattcctctggcgctgcgacgaaaaattctccgtctcgatacgcccggccgacaacccgggcttcaagttcaattacaacgacagatccgtcgagtcgcaaacgacgaaatactacctgccctcagacataacaatgaccagataacctcaaatcggcgtagttcaaaaaacagaacggcgcgttcactccaggacagggacgcaactatgggattgtgcggtacggatgcgcaatgcgggtgaaaggcccgccgccgataatttttaaatttcagaaccatgaaacatattgcaaaaatcattctcacagtgctcctgctgcccgggctctcaggatgcgagcagccttcgacatccgaccccaaggaagggaacgaggtatccgtcatgctcgaagtgctgtccgagcaactacacactaccagggcgattgccgaaagcgacatcgacgacgtgaacatcttcatatactccgacaccggagggctgaagcagcacatatacgcctcgggagcttcgcacaaaatagacatcgcaccggggcgatacagcatatacgtagcagcgaacatacatcaggatatgggggatttatccctcacgaggctccagtcatatgccataaccgccccgacggacgaagggacgctgacaatgatcgggtcggacaccttcaccatcgacggatcgggacaggtattgccgatctccctgaagcgccatgccgcgaagatcgcctacaacatcgcggtagacccggccgccggagacatcgagatctcgtccgtacagttatgctccatacccgacagggagtacctgataacggatctcacggcaccgacagaacccgcatccggattccacgactccgagatccgcaaattccccgacgggagccagcgcgcaaacgggatattctatatgctcacaaaccgtcagggcgacgtatcttccatagcctcgcaggatcagaagaaccccgacaaagctccgaagtacgcatcctatctctgcatccgcggccgaagcggagagaacaaggtcgtggacttcgtagtttaccttgggagcaacatgaccacgaatttcgacgtgctgcccaacgaggcgcacacctacaacatcacgatcctcagcgacagcgaaacagacacccgcatcacaagctacctcttcgagttttacagctcatggccccggagtccctattgcataccgggtgactacggagaattctccgtgcgcaacggaaacagaagcgaccacacctttaccgggcagctcgaagtgacgcaaggcgacgcggcgagtttccgctacggcgacggcggagcctggcacgagggagccctgcacgacgtatacatcccggcaaagagcgacgccaggggcgacatggaatacacccccgcactgataaaaaagggcgtaaaccagacgctcgcatacaggctgacgattacagacgagcagggggggggaagcaatacggttcgaaactggccgatatcgcatcatccgagtttgacaagcaactaaaagccctgacatctatcagagggatcggaatcacgctcgctacggcactgatccttacaaccggaggatttaccttcttcgacaatgcaaagcaactgtcacgcttcatcggaatatgtcccacctatcaacaatccggaacatccgtaaatatcaaaggacatataaaccgaaatggcgatgaacacttgcgatccttgctctatgtcgcctcgtggactgccttgcgttacaatgcggcttgtcgggaatgctatatccgattaaaggccaacggaaaaccgtccaaagtcgccctgatcgctgtggctaacaaacccctcagaattaaattttactttttctaataaatttaacaaactatattccagcggattttacacatgttcaaagagttgcaacttgccattatcgagagttattgcgatttcgcgtgttccacctgtgttccacgcgccgtccgcctacccaatcaaaattgaaaagtgaatccccgacatttgcggatgtcggggattattcattcggacaaccgacccaaaatttctatttcagatcacgggccttgatgcgcacgacctttccgtcgcgcacgacgaccagttctccgtcctccttcttggtcttttcaatcagacgcttttgggcaagcaaaatgcctgcatcgattttctcctgcatttgcttaatctcaatctcgctcatagcctacgatcttttgataagataacggatcgacaatctcttttatttcatccttgacaccccaagcaaccttgtgaataccatcggcaacactattatcatagattatccaatagtcacaaatcggggtatagagggtcgttaaattcttgatgccgttcgcataacgccgccgaatcacatccgacggaatattgtgcccgccctcgcttactcgtgttgcaacacgctcgatagcctgttcgggtgtcggcaaccaaaagtatagcaatgtcacaaaatagcctttcgcctgcgcccgctccacgaatttcacataggaacgggtcgccaacgtcgtttcaaacgcaaaatcctcgccttcggacaaaagatcatccattcgttgcagcatcaaccgtcctgcctcgatcgcaacgctttcgggattgaacggcgacagtccctttgctatttcgtcggcattgacgaactcccggcatcccaacatttcaggcaacacggtataggatgcagtcgttttccctgcaccgttgcaacccgctatgatatagagtttcggcatacttcgtaacaaaggtacgaacaagccgcgcacaaaagcaaattttatttgcgttttgtcggggcggagtaccttcgacaaagtcaaaggcaactatttcagatgacttacgaccaaataccagtctataaaaatcacattataccgagcagcgacattaaaaatccggatttttcccatataatttatttatccacatggcaaataatcggtcggttacagaaaaaaccttgttaatttcggtgataagatccttttcgagtagtttctttgcggccgactgtaccgaactggccgaagtaagactgtgccgtttgatgaaatcggcagatgtaatacgctcggcttcgccctccttggcgatggcataaagcaactccttctgcttttcaggaacgttcgacaaaatctcccggaaaatcgtatcgttcgaagcaatcatattatcgatggcagcccggatcgtctccaacgtacattcgtcgccttcgggcgtatcggcaaacgattcgttgaaggtcttttggatatagtaggtgtgcccctgaaaaagtgcataaaccttttccacatcgatggcggctatcgaacggttgcgccgctcgaaatgcccgacgataaacggaatgtaaatctccgcaggaatggctttcagctccaacatgtcggcactatggtagaacggccgggcggctgatgcaaacatctcctgcatcatgtggcgttcgctcccggcaaagataaaatggctgttctccgacctttggatgtgagtccgcaacaaagcctctatgttcttctccggatatttggcaatttgctggaactcatcgatcgctacgatgcaaggcttgtccgcatgagacaaatattggaaaatctcatcgagcgtatattcgggccgctcgatatctcccaactccacattgaaagtgggaagattggtgatggggtcgaacccgaatttcccgctgatggacttaatcgtctgaatgaaaagagtcgccattttacgactgcgaggcaggagtgtttcgtaaatctcccggccgagcagataggtaaattcgcggaggctcgacgtatgcagaatatcgatgaaaaaagtatagtactccttaccgattcccggtttgtcgtaacagaactgaatcagtcctgttttacccatacggcgcggtgaaatgacaaccaaattattgccgttggtaatcgacttgacaagccgggctgactcgcttacccgatcgcaaaaatactccggagcgatctttccggtcacgatgaatggatttataatcttcgccataggaatatcattttttgcaaaaataattattttattcaaattatgcaaatcgaataattatttaagcgccccctcgccgacataaaagccaattttatccacaaattgcaattattttcatccaaaatcaaaattgacacatccgaatcattcagattcaacggcaaattcagaacacataactatctgtatctattgtgattaagcgatatctaatttcaaaattcaagatacaaaattttaaaatacttggaatcccttaattgccgttctatttttgcaatgccacgtgcgagttattctgtaatcgtataattggaatcgataatcccgcgtatacggttagtgctgagatagttgttgccattctattgcaagtaactcataactcgtaacgcaatgtcggtggcgcaatcatctttttattaacacgaatgcagatagaatggcacattccatccgatttccccgtcgtcacgacaaagccgaccgcaacggacgttacgccgtcaggctgtgtatcaccaaaaacaagcggcgcaaatacatcgcgctcgatctctacgccgatcccgcatattgggacgaggccggtgagcaattcatcatcctgcgcaacctgaaaggagccgagcagaaggccgagaataaacaacgcgaagccgacaatgcgctgctggcgaagtacaaggttcgcgcccgcgagatcgtcgaacgtttcgaaatagagggtatcgactggacgctgaaccagttcgaggacgcctttctgaatacctccaaacagggaaagttcaacgcctatttcaccgaccgtatcgcggaactgcacgcgacgggacatatcggcaattcccaaacctataagcagacgcaggacatgttgagaagctatgaccggaagctggatcaacggctcttttccgacatcgacctgcgttatgtccggggattcgatatgtttcttcaaaagcggggctgttgcggcaacacgcgcaaattctatttcaaggcgttacgggccattctgaaccgggccaatgcggagggcgtcggctcggtggcaacctatccgttcggacggggcggattcgaggtctccaaactcgaagaggcgaccgccaaacgctacctgcctgccgccaagttatcgaaactcaaaagcagcacggccagcaatccgcaatgcgaatacgcccgcaagctgtttctattctcctattattgttacggcatttcgttcatcgacatggcgatgctcacggccgcccatattaaacaaatggaggacggcgactatatcgtttacaagcggcaaaagatcaaacggcagaaaggtgtcaaaccgatttcgatcaagatcacgcctgcgatccggcaactgatcggaagcctgcaagcggcctcgccgaccgtggacgattttctgctgccgatcgtcacccgctccggctatacgggcgagcggctctacatgcacattcgaacccgttacagcaagtatcagaaatacctgcgcctgctcgccgaggagctcggaattgatttccacctgacgagctacgtctcccgccatacggcggccatgaccttgcagcgcaacaacatcccacgcgaggtgatttcacagatgctcggccatgccgatctggaaaccacgaacatatacctcgacagcttcgacaacagagtgatcaacgaggcggcgaaagttctctaacggccatcacggtttaattctgctcgcctttttacgctattagcacaaatatacgatttaaaatcaaccgaatatgtattttttccaatcatcgcctgtcagttataaaaggttcatcaaacggttccccaccgaaaatagtcttataaaactgtacgccaagacttgtgttgattttgatattgaatcaaagcccaaaaagcgacgatgcccgcattgcggcagctgtcaaaacggccctttcagaaagaataatgaaaaattacgcttatgtaaaagatgcggaaggactttctctatattcagaaatagcatcttcgacaaatccaaggccgatttccgaatttggatgtatataggctattgtatgttctactaccaccacgtctattttaatgtggacaaaatttctcgaacacaaataatccgagaaactcatgcaccctcaaacgctacgatctatcatatatacgatgtcctgtacaaattattcaagagccaaaacaaggtcgatatgctactaatattcaacatattcctgccatttatgaagattttccacaacatgaacccatataggaaaaaagaacattagataatccgctgttaaacagcggattatttctattaagagctattaaatagttcggccggtaaattaggttgtaaacttttaaattatttacaagaatatgaataacattaccgacgacactccgatcgccatgctgacggtgggacaattgaaagagatcttatcaatcgacaaaattatggggcatctaactccgagccgcgctccggacaaagaggtgctgacagccgccgacgttgcccggcttacagggtacagtatctctacggtctataagctcacaagtgaacgaaagataccgttccacaaaccggagcataaaggccgcaaactttactttaaccgtgaggagattctcgactggttgcagagcgaatcacacccgacgatcgaacaggaaaacatccggaaaataaaacaattaaaaaaacattagtcatgaaaaatgaaaaaacaacgaccaagcccgcattcgacccggaggttccgccccgtgaagggttcatcttctaccgtaccttttatgaagcgctggcctcgatgaagaacagggcaagattacatctctatgatgtgattatgagatacgccctctatggcgaggaaccgacggatctcaacggggagcagatgcgaaccttcatactgatccgtccccagctggatgccaacgaacggaaacggcaagcaaagtacaaaaagaaggcaatcaaaaagaataacgacgaagaactcaacgaatttttcacaaaaaccgaagacgaagaaaatgacaatctacgaatactcaacgatatacaatatgaataggtcgctcctaaaagataattctaacatgaaagaaaacgaatatgacaatgggtacatagaaaggcaaacagtcagttcgaatcccccggaactccctcagatcagggtctccgtgttcgagaactacttcgcacagaaaccactcggcgatgttgacctgataaagtggtgtaagactgccaaattcaaggagcaggttatcgcgttccgcacgacctccaacgagaaggttcgccaacgaattaaacgcaacctgccgtgcatcactcccagcgggatattcaagactcggagccgtgacgggctggttcagcacaccgggttcatatgcatcgacatcgaccacaaggacaacggcgtattcgggccggagtggttcgataagaagagactcgtcgccaagaccttcgacagcttgttgtgtgcaagtatgtcgatcagcgggaatggcttgtacctgattttccgcatcgctcacccggacatgcacctggcacagttcgacgctctggttcgggagatctacgagaaaacgggactcgtcgccgaccaagggtgttgcgatgtctgccgcttgcggggagccagttacgatgcctatccatacatcaatccgcacgcgaagccttatcggggcgtgctgaaagaaagaaccgcaagggccaaagtccggacggcccgggaaaagaagctgctcgatgaaaaggtctataaattaatccagaaaatccgtgaagagaagaaggatatcaccgacgactatcacgactggtattgcatcggatgcgccttggcacacgaatacggcaaggaggaggggctgcggctatttcatctggtcagcatgcactccaagaagtattacccgaccgactgcgacgagcagttcgccaaatgtctgcggagccggaaaatcgggatcgagaccttcttatggatttgcaagaaacacggggtgacgttcaagtagcccgccgtcccgcacgccgagccggaaccttttcgaggggtttcggcttttttttatgatggcctcggaacgtagagactcccgaggccgattccaccgaaatttatacggcgataccccatcgagtgttgttcgagcgaaaataatttctaactttgtcactgccgatgtccgcaaggactgcggcagacatactggaagtgtttttcgcacgcctttcaaagaaaatgtggcaattttcaatagcaaaggacgacgaacagcactcattcttgtttagatcatggcagggcgcattcggtgcgcccatatcccatatctattcgagcgtgggatattgcctcgtttattcttacatgggttctgctacaaccttccgttagatagacgaaatcgactccacgctttctttttgctactaacccagccatacaggagccggatggcaacataaaaacttgttgctatgacctattacaaggacaccttacaggcattcttggataatcacatccacgaaatcctcggaaagctcggccgcgagttcgattccaacgattttattacagcattcaggctgttattccccaatgaatatgcaaccgtgctacgaagaagcggctcttatcgagctatccatacttgggttgcccgatggtatctttccggccgaaccgatctacttcaaaaaggcgatattcggcagaggcagagcgacaaccgcaatccaacaaaaaatcgcatgtggatcaaactttaacatttcaacaatatgggcagaaaattcataatagaggaggtcgaggaagaatctaagttcggctgcggtagtatcgtagcgacgataattattgctcttgtcatcggactgtgcggcggattcaaatcatgtaaggaagacaaaaaaccgaaagccgtcgagagccggacggaacaaccgcaacgtttggacgaagtaaaagtccaatcaccgccctatgtcccgaaaagttcgcatccgagtgtttccgcaccgacttcaaccaccgcatccaagccgcagaaagaagcctcagtcgaacccataacggaaacatccttcgatgatgatattgaggtggaagagccgcttgtttccacgcccccgacccaacaagataatagcatcgtcacggagacctattccgaaacgcccgctttgacggaaaaggaacgccgcaaagccgaacgtcaggccaaacgagaggcccgacgtagagagaaagcgcagaaaaacaattaaaattatcctcaagattgataaataaacggttattaccatgacaagaattactgcttatgtgatcctcaaagaattaggtaacgatgcgctgcacaagtacatttacgagaacattgccgaacctacctttgactcgcaccggatcaccaatccttttccgcaggatttcagagactattacgaacgtatgctgatcgcacatgcggacgaaggcgacatccggaatcgtaatgtaatcatcgcaaaccgtataggcatctatctcggtcacaacagcagggatttgcagattgaaaagatcggagaagttacgtctacaaacatgaacggagaagaaaccccgacttcgctttggagaaaaacaaccatgtaacactacctttactatctaataataaaactatggaagaattttactcacctgtatggcaggaatacctcggtggagtgagcggcattgtatttacaatcatcatcattcttttattcgttttcacgtttcgatacttgcgtaaaaagcctatttcgcccactgctccgtcccaagttccgcaggcaccggatgaattgccgacagtcgaaacctcacaaccagaaccgctattgattcattgcccggcctgcgggacggaaatatcccgttacgccccgtcgtgcctaaaatgcgggcatccaatctgcccgaccacgaatccgagaaccacatcaccgacagatcataaccagacgatcatcattcagcagcccgttcgtcaatctaacgggacaggaaccgccggattcgttttatctcttatcgccctgattctaccatggttcccgggagtaggctgggtggtttggtttctgggattcatactgtctttcatcggcatattcaaaagcccgcgaggcttagcgattacgggctttatcatttcaataatcgacctgattattttagttgcactggtcggaacccttgccggtatagcctcaattttattgtaatatataaaaaaattaactatatgcaaagaatcacaaacaatatttcagcaaatttaacatcaacccaagcgacagaaaaagcaatgtataacatgggtaaattaggatttatactatctcttttttcaattcttggaagtggtgtcatatcgccagcatcccttattatttcctgcattggagcaacttatcgtcaaacgaaactaacaacggcaggaataattatttcatcagtcatgttgttactattcttaatcggctcttgttttgtctattattacctctctcatgaagaatattaatagcacctttagtgtatgccgcagcgttcttacgttcaacttataatcttttcccatgaatacaactattagctcagacaataatgaacagactcaaatacaaaataatcgcattggaacagccggacttgtattagtccttatgtcgttcatattattttctttcgaagggtacatcataaattcattaaacgataagagtctgtttttcacacttattttaccagtcttaatagggaatttatggttattgggactaatattttctattataggcctccgcattaaccccaagggcagagcaatagcaggattaatcatctctctattgccgattctatttgctgcaataagtactatgagtccccaaatatcaacacctatccattttgaaaacgaattaaaagaacgcaaagcacaggtcatcgaacgcatcaaggatgtccgcaccgctcagcgtgcgttcagagccgaatatcagcgttatgccgaagatttcgacgaattggagagatttcttcatgcaaatccaaccgaattaagatgcgacatcgagcaactccgttacattcccaattccgacaacgagtttatcttggaaaccggatttaccaagacatcctctaatcgtaccggccctttcatagaagttcgtgccccctacaaactcttcctcgatacgattaaataccggcaggaaataatcaatctaattgatgaagaagtaaatgttttcgaccgttatcccggcatcaaattcggctcgacagatgaagccgataatgatattggtaattgggaataaaattaatttctcgtatataattccggtcgaggataaagcacatagttataagttgttatccacatcctttctgagtctttatcccgaccgttcttagttgtcccgacctgccgcaacccggcaggtcgctttgttaaatcccgacagaagatactgcgatgcgattacggctcatgtagccggaaactcgataaaattcattaaccgcctgtttcaagcctgtgtatagggcttaaataagcaagccgcaacggcgatctaccagtacatatcggcagaaacgacctgcgtattcacagccggaatgtattacccaaaaacaaaatcacatgaaaaccaaagaagaaatcaggcactatcttgacacccgattcagcccgtcggaagacgacatggtgcaaatcgtccggaacgatttcgaccgtattttgaatagcgcggcatcttgtgccctaattacggtcgagggtgcaatgcccgtcttggcggaacaactccgcaccgaattggaagccctgcacatcggagctgacctcgacatggttataaaagtaagctatcatcccgcatcggaaattagtttcgacgacctatgtagcctcttaaccgtcatccacgaatttgccccgcaggtaaatatcgtctggggttgcggcacagatgcaaaactggcggaaaccgactattcgattctgttgctgatcgggacatccgcagagtaaaatttgcaaggcctgccaaaacatattgacaggtcgttttgtttcgtcggaacagaagatactgcgacgcgattacagctcatatagccgcgaacccgataaaattcattatctgcctgttcggagcgactgcatagacccaaatacagcaaccgcccaacaaccaaatacttaacgactgagattgaaattttcggatggcgaccatttatgtaccacttgtgtaccaccgctacttttccggctatacatcacaaaagaaaaaccctcgatattcgattgaagttccggggatttacaaaacaatgctgtaacctaataagttacggcgttgtttttttatgaggtaatgatttagaaacgcaagtcttgaataaacttacatcgaggttcatcctgtcaaacaactctatacaaatatagtgaatatctgataaaaaagcaaatagaatttttatctctctattttccgatttatggcgtacatcagcgtcaccgccgtgtcccgtcctgaaaaaggtttacagtgattgataattaaagataaacattttggttcaaaaaatattgtcctgatataagtttacatatgccttccgaacaaccgtctttcggccccaatgatgtttgagtttcccggttctaagttccgcttccaagggcgtaagccaatcgcagctggcatgaggtctgagtgaattgtaaaggataacgatctggtcgatgcgttcttttgctgcctgaaaactttcaaaacattcctcgtcgatccattcgctcttcagaataccgttcacccgttcggcaacggcattctcatacggatcgcccttttcagtcatgctgatgcgaatcccattatcggtcagcaatttcacatattctttcgaacaatattggcatcctctgtccgaatgatggattaacccttgccgtttttgctgcggagtctggtctatggccatcctcagtgcacggagcgctccgtcccgttccaatgtcgtattcagatcatagcctacgatccgtttggaataggcatccgttatcaaagccagatatgcaaatccttctttcaaagaaatgtacgtaatatctccgacccataaacgatgcggccgctcgaggtcgaaaccccggatcagattcggatatttacgcatccagtgccgcgagcaggtcgtaacgctgtatttcttccgacgtttgaccagaagattgttttccgaaagcagcgtaaataaccgatcccgactgaccggaaatccgtcttgttgcagcaaatgccacagtttacgaccgccgagcctgggcatcagtttccggtagtaacccacccgctccaaaagaagggtgtcggacaaagatccttccctattacgccgtaaatgtttataataggcctgacgggtatagccgaacaacccgcacagaaacgacaggctcattgctgtgtgtctttctttgagacgctggactgtccggctgcggatttttttagcaggtcgataccgtattcttcttggaggatatctcccatgatctcatagccttccagacgtaataaagcctcttccaagcgccgccgaagggctttgttctcggataataattcactggcttcttcactcgtaacgcgggacatgatcggataaggattaggggtactcacaaagctacaactatttttcgctttccaccgctgacccatcttatgaatcgtagacatgggaataccatgttcttcggagagttggcgagccgtcttgactccgctcaaatactcctgtaaaatcagatgacgcaactgacgcgataaataatgacgtgataagtctgaattcgttttttgctgcataagatttactcttttctgtaaacctttttcaggacgggacagggcaaaaaaaagccatcggtgcggactggagcggactggagcggacatcggaaccgaagcgttttaccctgttgtatattgcggcaggattgattattcgggcaactgcgcgaatcgcaaaataagtatcggttcagacggatacccgaatctttaaccgagtatctgcgcaaaggaacgaaagggcggcagaccgaataatcatccaattattcgtccaaatataaggtagtatatataaatgatttgacagacgcatagttacccaaacaaccatttaaacacacaagcaatgaaacaagcaagcatttcgatctgcaatcaaaaagggggcatcgggaaatcgacatttacgatgttactcgccagtcatctgcactacacattaggctatgacgtgctggtcgtagactgcgactatccccaatggtccgttcaggcgcaacgtgagcgggaactgtcgctcatcgagcatgacgattaccacaagctgttgctggtacgtcaattcaaagcgacgggccgcaagctctggcctgtgctgaaatgtatgccgcctgaagcccccgaagaagtcgagcggctgctgcaaagcggctaccatccccgtatcattctctacgacttgccgggaacggtcaatgccgaaggtgtcattcggctgctcgcgtcgctggacgctgtctttgtgcccatgaaagccgacaaggtcgtcatggaaagtacgctctcctttgcccggagtctcaccactaaccttgcccaagatccgacccttactttacaaagcgtctatcttttctggacgatgatagaccgtcgtgaacgaacgccgctttacgatcgatacgaggccgttatccgcaagctcgggttgtcgcttatgacaactcacattccttaccgctcgaagttcaacaaggagctgcttgcggacaatacaggagtcggccgctcgacacttctggctccggcgcgaacctttgcgtgtgaggcgcaactcgaaatcctcacagaagaaattcttacactcctcaaaatccgataacaatggccaagaaacccaaaatcgaagtagacgaaagtcttgtaaaacaggtgatcgcaggacagttacctatcactacaaaggtcacacgggtaattccggaacagatcccatccggaaccgctacggacgcaattcccgccgaaccgccctctgttccggagatcgacacagaaaagattccggatgaaaccccgtctgtgcccgcagcacaagagccacgccgtcggagaacaccacccttgtccgattatgaacgaatgtttctcactcctgtggaatacggcatccgagccacactttatgtcaatgcatcgacgaagcgtaagattctggagatacttaaaagaatcggaggtgaacgattatccgcgacatcatatgtggataatattctacagcaccacatcgaaactttccgtgacgatataaaccggctcgatcgtaagcggaattttgaaaaacttgtttaacaatgacttaaaaatttctaattatgctttacagctttttatccgagtccggtgtcctcgacatttcattactcgctcttggcacaggcattatcgttttgtcaatcttagggctgctgcacctcgggaagcgacgaggtcataataaagccggacacttttcggagcaacctgacgattgtgcaatgcctgccgtgcaaacggaaaatagcgatggatggccctcgatggaacaacctcagacaactgaacttgtatccgttgtcgctgcacctgaagattcttcaaatcccgattctccgccttccgaaacggtcgtatccgaaaagcaggatgtgaagccggagtgtgttcccgtaccggacatacgatggcgacgttcgatgacattgcccgactacaaaaaaacatttcttgtccgggtggattacgacctccgcgcctcgctttatgtcagtgcccctacgaaacggaaaatccttgaagtcctgaaaaaaatcggcggcgagcgactgaccgcaacatcttatgtagataatatcctacggcaccatctcgaaatgttccgcgacgagatcaactgcatacatcaagaacagaattaccataacatcgtctaaattctttctgccatgaacagcataattcttattgccgcctgcgccgtatgtctggatcagttgtttttccgggggcggctcgcgtcatatgtcgtcgacaatctgaaaggtccgaagaaaaaacacaccgggcataacgctgcccctcacacgccgaatgccggtactgcaccccgtcaaactcctgaaattctcgtgtcaaaatcctatcggtgcggactggagcggactggagcggacatcggcaccgccccggcaggcggagatgctatatttgccccggcttcggaagagaagtccgcgatgcaggggtggaacacccttgtcgtgcggccctcgatcggcgaagacggcgaacttgcggagcccaaagcgcccgccggcgcccgattcccgcttccggctctccccgccagagcagaactccgtgacgcggaggttcatgcgatgctcggagagctggacttcggagagagcgccgtcatgggcgatgccacggccgaggagcggcaggccattgccaacttcgacatccgggcctatgcttaattaaaaacgacctacgacatgaaatggaataacgaatacggctgacgccttttccgcagcaggaaatacgatgtatccggtcgcagaatgctcccaaagcaggctgcggcctttttcacacccttaaccaaactacttgaacgatgaaaaaaagagcaattttcatgattttctccctgtgctccgcactcgcctgctttgcacagggcaacggcatggccggcatcagcgaggccacgaacatggtaacgtcctatttcgacccgctaacgaaactgatcttcgccgtcgcggcaatcctcggactggtcggcggcgtgcgcgtctactcgaaattctcgtcgggtgacccggacgcttcgaaatccgccacggcgctgtttctctcatgcgtctttctggtgatcgtcggtacggtcttacgttcgttcttcctctaaacgatggcggaataccaagtgaacaagggagtcggccgtcaagtcgagtttcagggcgcgcacgtaatggttctttggcaaatgcgtcgatagcaagacgttaggcaagtgttcgatagcctatcatcgatcggcttatccgaaagggaaaccggacggggagtatagcctgccgataaactgataagtcatacagttaccaagtatgcgactgaatcaggagatgaaagatagatacgaggataaagtctggattgattgaacgatagtccaagtggcacaactcgaaactgtggcggaaggtaactacagacgccatactgtaacacactcgattcgaccttggagggttgggtgcagaacaggttacagcacaactgcgataagcagaaacggatgaaagtcgtatccgacaatctatcaaagctatgttgccgaagaattaaacgtggattgcctaacccggaatgccgaaaggctattaggtttcagacctatgaaaatccggtatggcaacggagccaccgtagtagtccgagcgagggaaagcctcgtacatggcgaagggtggcagctaacatttttaatacaaattaacggataatgtgtgagacattatgagaaatccagagagagtattaaacagtctgtcagagcacagcaaagtttcgagctacaagtttgaacggctctacagggttctattcaattcggagatgtttctcctcgcctaccataatatacaaggtaggcagggaaatatgacggaaggttccgacggtaaaactatcgacggaatgagcctgaaacggattgaaaatttgattgatgcgctcaaagatgagtcgtaccaaccaaaaccggcaagaaggacgtacatcccgaagaaaaacgggaacatgcgacctctcggcataccgtctatcgacgacaaattagtgcaggaggtattgcgaatgctgttggaagcaatttatgaaggtagttttgagaacacctcgcacggtttccgacccaaacgcagctgccacaccgcactgatacaggtgcagaagaattttactgcggccaagtggtttatcgagggcgacattgaaggattcttcgataacatcaaccatgatgtacttatcggaatcttgaaagaacgtatcgcagacgaccgctttatccggctaatgtggaaatttttgaaagctggctacatcgaagattggacatttcatagaacatacagcggaacaccgcaaggtggcatcattagcccgatactggctaatatctatctcgacaagctggataagtacatgaaagagtatgcctgtcaattcgatagaggcgacagacgggcaatgaaccttgagtacaaacggtattccaggaaaatttggtggctcggcacaaagctgaagcaaaccaaggataaagatactcggaaggaactgattgacgcgattaagcaacatcagaaaaacaggatgcacttaccctctgtcgatgaaatggacgagggatatagacggattaagtatgtgaggtatgccgatgattttattatcggagtgattggcagtaaatcggactgtgaggccatcaaagaggatattaagaatttcctcggcgagaaactgaaattgacgctctccgaagaaaagaccttaatcacgcacggcaatagaaaggcaaaattcctcggctatgaaatctatgtccgaccattcacggataagacgttaagaggcgagaaatcgggagtacttattaaggcttacggcaaaaaggtagtgttggaagtgccaatgtccacaatgcgggataaacttctctactacgaggcgatggaaattcatcaattcgagggtaaagcgaaatggaaacccacaagccggacaaagttgctacatctggacgacctcgaaatactggatgcctataacagagaaatccgaggttttgcaaactatttttctatcgcaaataacagttcacacctgaattctttcaagtacatcatgcaatacagtctgtataagacttttgcacgaaagtacagtacgacagcccgaaagattatcgcaaagtatcgacatcacaaagattttgcggttttctatgaggacaagaaaggaggaaagaagatgcgggtattcttcaacgggagctttaagcgtaaaacaaccgcgatggacgcgagttgtgattatgtagccaacacgattttcaataccactgtatcaagccttatacaaaggttaaaagcgggtaagtgtgaattgtgtggcgcaacggaaaacattgaaatacaccacgtcaaaagactcaaagacttaaaaggcaaagagccatggaaaatccaaatgattggacgtcagagaaagacgttagctgtatgtattccctgtcacaacaagatacatcacgggataatagactgaatatgttagtggagagccgtgtgcgccgagaggtgcaagcacggttcggaggcgagttcttggaaacctaccgtagaaatacggcaaggcaccgggttcttagcctacgactcacggcgcagtacctcgtgctgttcgtcgcggggcttctgggcgtcttcgtctgcttcgccggaatgtacatgagcggcgtcccgcagggcctgtgcatcctcttcgccctcacggccggccttgccgtcacgggcggcaccttctacctgaaccgccgtttcggcccccacgggcttcagaagctcatggcctcgcgccggcatccgcggcgcatcgttcaccgccgggccgtcgggcggctgttgcgttttcgtcgaaccgtaaaactgtaatcctatgcgcggaaccctgaaaacctcgaccttggaatcgaaatttccacttctgagagtcgagaacaactgcatcatctccaagttcgccgacatcactgcggcctaccgcgtcacactgcccgaactcttcaccctcacggccgaggaatacgaagcactgcacggcgcatggctcaaagccctgaaagtgctgccggattacaccgtcgtccacaaacaggacttctttatcgaagaacgatacacggctccggaggagggttccgagcggagctttctcgcccgctcttacgaacgtcatttcaacgagcggccctacctgcgccatacgtgctacctgttcgttacgaagaccacgcccgaacggatgcggcagaccagcgcctcgtccgtgctgtgccggggcttcatcgtcccgcgggagatgcgcgacacggatgccgtgacgcgctttctggaggccgcggagcagatggaacgcatcctgaacgattcgggcctcgtgcgcgtcgagcggcttacggaagcagagatcgtcggcacggcggacgacgccgggctgctggcccgttacttcgccctctcggacgaacagcgtccggtcgtcaacgaggatatccgtctcgacccggacgtgatgcgtatcggggacaaatacctctcgatgcacacgctctccgatctggacatgctgccgcagagcgtggcgacggatttccgctacgaacgcctctcgaccgaccgctcggactgccgcctctccttcgcggcgcccgtggggctgctgctctcctgcaaccatgtctacaatcaggtgatcttcctcgacgaccacgacgaaacgctcaagcggctcgaagcctcggcccggaacatgaactcgctggcggcctattcgcgctcgaacgccatcaaccgggagtgggtgcgatacgtcgctgtgtaagtaattgttaaacttagatttaacccgttgtttcgtcaacggtagcctatggacagatgcaccaatagtaatatactgtatcaaagctgtccagacaaggtagcccttccgaaaggagcagtcagaaccgtgagggaaagacaatggctgttagtatcatacagtcagggagcttggcttgggtggtatggttagcgtaagcgaactgtcgtctaaacgtcgtaaggttgaagaagccaaagatactgataggcttcagcccaaaagggaagcagtcggttattcctctccattctgggaatacacgaacagagtactgccggtgtaatagacagaacctaacccacttataagttacttgcacggaacgtagtaagcccgtatttctcctgccaatgacaggtaagcagaccgtaaggaatgccgaatggagtgcgggtataggattgcagaaaaagcgaatgccaccctgtaatggggtgaatagggattgaaacatcatcccgctgcgaaagcaggctgacttctgcggtaggtgattctttacaagaaacttttagaacttttaaaaggagaaaagcaaatgaacgaaattaaaaaatcgtgtgcatcgactgaccaaacgcagagcaaatgggacagtataaattggctcaaatgcgaagctgcggttcaaaagctacaagcgcgtattgtaaaggctcaaaaagagggtcgccacaacaaggtcaaagccttgcagtggacactgacccactcgttttacgctaaagcattagcggtaagacgtgtaacttccaataatgggagtaaaacggctggcgtcgatatggtaacatggaaaacgccagatgctaaagtgtgtgcaataaccgaactgaaaaggagaggttatacaccccaacctctgagacgagtacatatcagaaagagtaacgggaaattaagaccattgggtataccaactatgaaagaccgggctatgcaggcattgtatctgatggcactggctcccgtagctgaaacaacggctgatgccaattcttatggtttcagaaaagaaaggagcacggcagatgccgttcaacaatgcttcaatgacctggcaaggacgacatccccacaatggatcttagaaggtgatatcaaaggttgtttcgaccatatcagtcatgaatggttgcttgacaatatccctatggataaagttttgctccgtaaatggttgaaaagtggatttattttcaacaagcaactttttccgacagaggagggaactcctcaaggcggcatcatctccccaactcttgcaaatatgactttggacggactggaaaaactgcttgccgatagctttccgataaaccgctcgaagaaaaattactatactcctatgataaatcttgttcgctacgcggatgattttattatcacaggagagagtaaggagttgttggagaaccatgttaaaccattagtcattgagtttcttcaagcaagagggcttaccttatcagaagaaaagactaagataactcatatagaagaagggtttgattttcttgggttcaatatcagaaaatataaaggcaagtttatcacaaaaccatccaagaagagtcgaaagagatttttagataaggttcgtgaaatagtggacaagaacaagtcttctaagcaacaatctttgatacgattgctaaacccagtcattagaggatgggcgaactactacaaggggtgttctgcatcggaaactttccgtaaaacagatgcacaaattttcaacaaactatggcgatggtctcgcagaagacatcccaaaaaaggtaaacgatggattgccaacaagtattatcacactgtaagaggtagaagctggacttttgccgtaccgcttgaaaacaggaaagtggataaataccacactcttgtgagattgtcggatacgaaaataaagcgacatatcaaaatccgcagtgaggccaacccatatgatgccgattggaaagatttcttcgatcaatacaagacccgaagaatgcttgcacacttagacggcaagcaatatatctatcgcctgtggaatcagcaaatgcaatgttgccctgtgtgtggcaagcacatcacacgggaaactccctggaaaattactgaaatgacagggagcagtagaaaggcgaaagtcctaatacatgatcattgcagccgaattactaacagaaataaatggaagttactatgagccggcttttagttacaaataaaagttttgaattgcttgagccgtatgaggggaaactctcacgtacggttcttagaggggaaagctcccgtaagggggctgacctactcgacatcgaaatgtacctcaatgaggcgcattcgcaggggctgcgctccgtaaggtgccactgcaacgtcatggcatgggccgagaacgaagcggagctgaagcgcatccgcaacgacgtgggctcgcagctcgcgctgatgggatgcacgccgcatcacaacacggtggacgtgccggtgctgttctgggcggcgattcccggcaacgaggccgacttccctgccgaggagagtttctacacctttctcgatcaggccctctgtcttttcaacggggagaccaactaccgctcgtcgctctcgcccttcggaatcaagatgtccgaccgcctgtcgggcattccgattcatctggatatctcggatcttccgatgaagcgcggcgtcatcacgaatcggaataaatttatcctcggaccgtcgggctcgggcaagagttatctgacgaaccatctggttcgtcagtactgggagcagggttcgcatatcctgctggtcgacacgggcaactcctaccaagggctctgctcgctgattcacgccaagaccaagggccgcgacggggtgtatttcacctacaccgaggaggcgcccatcgccttcaatcccttctatgtcgaggacggagtgtacgacgtggagaagcgcgagtcgctcaagacgctgctgctgaccctttggaaacgcgaatccgaggagccgacgcgctcggaggaggtggcgctctcgaacgccgtgaacctctacctctcgaagctccgcaccgaccgctccatcgtcccctcgttcgataccttttacgagttcgtcgaaaccgactaccggcggcttctggagcagaagcgcgtgcgcgagaaggatttcgacctcgaaaatttcctgaacgtgctggaaccttactataagggcggcgaatacgactacctgctgaactccgacaaacagcttgatttgctggacaagcgtttcatcgtcttcgagctggacaacatctcctcgaaccggacgctgctgccggtggtgacgctcatcatcatggagaccttcatttcgaagatgcggcggctgaaaggcgtccgcaagatgattctcatcgaggagtgctggaaggccctcacctcggccaatatgtcgtcctacatacgctacctttgtgcgcccgtacaagctgcttagtaaatatcccactggcaagggattaggtaagtgttctttgaaaaacctatcatcacccgacttatccgaaagggaaaccggacggggagtgtagcatgtcgggaacgtcgtaagtcagtcagttaccagactgccactgaacggcaaggtgaaacgatggatatgaggatgaaaaccgaattgtttgaacgacagtccgagctgctctacttgaaggctatgacgtaaggtaactgaaatcgtcatactgcggtactgctccggtgtataggtacggacgcaagcaagaacttgccgcagagcaaccatgataaatggtaaaggacggaaatcgcatccgacaatccatcatgccaacagttactaagtaagtaaacggggattacctaaaccggaacgccgtaaggctatgaggtgcagacctctgaatatccggcacggtaacggagcctccgtagtagtccgggcagggtaacgccctgcacatggcgaagggaggcagctaattttctttaatacaatttaatggataatgtgagagacattatgagaagtccggaaagagtattaaacagtctgaacgaacacagtaaggattcgagctacaagttcgaacgcctttaccggattctgttcaacgaagagttgttctatgttgcctaccaaaagatcgcatcgaacggaggcagtacgaccaaaggctccgacggtcgcagtatcgacgagatgagccttgcccggatcgaaacgctgatagcctcgttgaaagacgaaagttatcagcctcacccgtcgcggagggtgcatatcccgaagaaaaacgggaaaacgcgccctctgggaataccggcttttgaagacaagctggtgcaggaggtagtccgcatgattctggaagccatttacgagggacattttgagaccacctcgcacggtttccgacctaaacggagctgtcacacagcattacttcatattcaaaagacgttcagcggggcgaaatggtttatcgagggcgacatcaaagggttcttcgacaacattgaccatgatgtacttgtcggaatcctgcgggagcgcatttcagatgaccgttttatccgtctgatacggaaattcctgaaagcgggatacgtcgaggattggacgtttcacaacacttacagcggaatgccgcagggaggtatcgtcagcccgattctggcgaatatatacctcgataaattagacaagtacgtgaaagagtatatccgacatttcgacatgggaaccaaacgcaggccgggcaaagagagcaacgatttggccaatgaacgaaaacggactgtgcggaaactgaaaaaggtaaaagacgggactgagaaggcggctttggtcgcaagactcaaagccatcgaacaggaacgtgcagcatttccaagcggagatgaaatggacggaagttaccgcaggctcaaatacatccgttacgccgacgattttattctgggtgtaatcggcagcaaagaggatgcactgcggataaaggaggatattaaatcattcctatccgaaagcctcgccctcgaactgtccgaagaaaagacgctgataacccatacgggtaaatcggcgaaatttctcggatatgagattacggtaacacggaacaatcatcaacgacgggatgtgcaaggacgtctgcgacgcacctacggcaagcgtgtccggctgaatgtcagcatggcaacgctgcgggacaaacttctggaatacggagctatggaaatcaagctccgcaacgggaaagagatttggaaacccaaatgccgttcaggattgatattcaacgacgatcttgaaatcctcgaccgatacaatcgggaaacagtgggattttgcaactattacctgatcgccaacaactgcgtcgtactgcacaacttcagatatatcatggagtacagcatgtataaaacatttgcgggcaaatataggagcacggtacgaaaaatcaacaaaaagtaccgtctcaacaaactgttcaccgtaaagtacgagcagaaaggggtaatcaagtcccgaaccttttacaagacaagtttcaaacgccggacaacggcgttcaacggaagctgcgacatcgaaccgtactctattgcagacgtgagccgaaccaatttgacggacaggctcaaagcggaaaaatgcgaattgtgtggggcaacgggcaagctgattatgcaccatgtccgcaacctcaaagacctgaaagggaaagagagttggaaacggctcatgtcagcccgaaaacgcaagaccattgcgttgtgtccgagttgccacaggctgcggcatctgggaaaagtttagactgaaaaaaattagtggagagccggatacgccgagaggtgtaagtccggttcgggggcgagttcttggaaacctgccgtagaaatacggtaaggcgccgggtgcttagcctacataaaaccgttcgcaagtatttcggcgaggcggtcgtggtgacgcaggaggtggacgacatcatctcgtcgcccatcgtcaaggagtcgatcatcaacaacgccgactgcaaaatccttttggaccagcgcaaatacctctcgaaattcgacggcatacaacgtctgctgggactgacggacaaggagcgggcgcagattctctctatcaacctctcgaacgatcctaaacgccgctataaggaagtgtggattgggctcggaggcgtgcagtcggcagtttatgccacggaaacctcggtcgaagaatatttgacctataccactgaggaatcggaaaagatgcaggtcatggagcttgccgaaaagctcggcggcgacatcgaagccgccatccagcagttggcatgcaagcgcgaaacgaaaaccgaatcttaatgcccgctgccatgaaacagttgctttggatatgcgccggcatcctgctgacgtttacggccgtgctcggagcgtttcacctcttctacgattacgaataccgcaaaatccgtcccctgtgcggagcatggcattcgacgctcgacgacacgcggctggtgatcgagccgtgcggtgataaattccgcatcaccatcacgcgccgcggcacgtccgaaacacatgctctgcactacaaggattgcgtctattatacggcctacggcggacgccggatcgatctcttttacacgcccccggccgatgcactgctcctcgtgccgggcgacgctttcaaacgaacctcaaaactcaaaaacaatgaacagtaaccaatcgacgcctgcgtcggccgtagcggcccttcagcaggagatcagaacccgcaccgaagtcatccgcactttggcagaccttcgggaacaactcgacgccgaccgtatctgcggagcgtggctctcggcggaaaacaacctctcggcctcgatacgccgcatcggcgagggcatgtggcgcatcctcgttttcgaccacgcgctctgctacaaacgcctcgtacaggacggcatcatcgcgctgcgccgccaccgtctttggctcggcgccgacgacggcaaccgcgtgatctacgatgcttccaccgagacactcaccatcggctgttacggacgtttcgttccggaggactgcatccggcggcaggaagacgacgcaatcagtgccgaagcgtgcgacttcaacgaaccggccgaataatggagcgtcattcggtatttccgggctgcccctgcttgctggggcagcccttcggcagacgctgcccgcagtcacacatttctaaatccgacggctatggaatggaaagataggattgcacggctattccgccgcaagccggactgggaaagggagcatcgaagtaccctcattgcccgtcatgcagagaacctgctccgggaacgggatataagcaatgttacagatcttgtacgacggcaccggaaatcggatctgaccattgccggaatcgggctgacaatgaatacagcaacatcccgctttctcaggacgcccgaagatgcggccggagaagatgtactggcgctgatggaggccctgcgcggaacgccgtttgcgaaaaagatcgggtgccgcctcgcggacgttccggcaaacaccgcccactccctgcacggcctgctggccatgcacacctttctcttggatgcttatttggagcagcatcccgacagtgggctccggcagcctccgatggacgagttgcaggccgcagcgcatatcatcgaccggcagttccgcgccgagacattccgcgagctgcgccatctggcagaaacgagaggacgttatatgccctcctgttacgtcgtacgcctctacgactgggacgccgacatgggccggttgcagaagatgcgcgggcggctggacggcccggcatgtgcggacaatccgcagcaggtgcagcagctccgggagcgaatctggaaggccgagaaccgcatggtgcgggaagccgagaggatattagagagtgatccggaaatttccctgcggcaaacctacattgaaaaactcgatgccgagttgcagacattgggatggcttgcacgcttcccggagcgaatcgacgacagccgtattaaccggcagctgctcgacaaatacggtatcgagccgggcatctcccgcgaagaacaatcccggcaggtcgagaaagccttccgcgagctggatgcacgccttgtccgcatgaccgggcggcagtcctacgccgacgatctgttcgaatccctgcggcagaaaggcccgaagccggagaaacatatttccggggtgcggcagaaagagatcaattctgcaaggaaagagcaaaccggacaaccggcttcgggtcggcggataaagcggtgatgcccgtcttcgggtgaatatcctcaataacacaatcaattcaagcatgaaacagaaaatcatcctgctgtgtctgtgccttgtctgcacgggcctcagcacatacgcccagtgggtcgtctcagaccctacgaacctcgcgcaggggatcgtcaactccaccaagcaggtcgtcgaagccgccaagaacggctccaccatgctgcaaagctttcaggaaaccgtgaagatttatgagcaggggaagcgatactacgacgccctgaaatccgtcagcaacctcgtccgctcggcccgcaaggtgcagcagtgcatcctgctcgtgggcgaaatctcggacatctacgtcgacggttatcgccgcatggtcggcgacgagaacttcacgcccgcggagctcgcggccatcgccgcaggctacgcccgcatcatcgaggaatcggccggggaattgaaggagctgcaggacatcgtgaaccctacggatatgtccctgacggacaaggaccggatcgacgtggtgcagcgcgtctacggcgttctgcggcgccatcgagacctggcacgctactacacgcgcaagaacatctccatatccctgctgcgggccgcccggaagcgggacatggagggtgtgctctcattgtacggaaccgacgaacaacgttactggtagccgacgatggtacacatgctttcccttacggacaatctgcatacgattctccgggtgctttacgacgacatgatggcgctgtgctatccgatgtcgcaggtcgcaatggccatcgcagggatcggggcgctgcttcacatcgcctaccgcgtctggcagtcgatggcccaagccgaaccgatcgacctctttccccttatgcggcccttcgccatcggcatctgcatcctgttcttcccgacgctcgtgctgggaagcctgaacggcatactttcacccctggtaaaggcgacgcattcgctgatggtcgggcaaacactcgacatggaacaatggcaggagcggcgtgagcggctcgaactcgaaagccgcgagcagatgcccccggacagctactatgccgaagacgaggagatggaacgcgaactgaatgaactgggactcgacgaccagacgcagcaggccctcgatcgtatgaatgaacagcgttcctcatggtcggtcaaagggatcatcttcaaatgtctggcgtgggtactcgaactgctcttcgccgcggcgagcgtcatactcgacgtgctgaggactttttatctggtcgtattgagcctgctggggccgatcgcctttgccatctccgtgttcgacggatttcagtccacgctgacgcaatggctcacgaagtatgtctcgatctacctgtggctgccgatctcggatcttttctcggcgatcatcgcacgtctgcaaagtctcgccatgcgacacgatgccgaactgatggccggaggctacaactggtatgtggactggtcgaacagtctgaatctgatcttcatgctcgtagccgtctgcggatacctctgcatcccctcgatcgcctcgtgggtcgtgcaggcgaacggattcgccgcctataacaagaccgtctcgaaaatgacctcgctcgtaagcgccggagccggatggacggccggcaaagcatgggccggggccaaaggcgccggctcggcggcattatcgggcggtaaggccgtgggacgcggcatcatgaacggcgcccggcttattttcagaaaataaaataacccgttattatggaattcaagtgtttaacgaacatcgaaacatcgtttcggcagctgcgcatgtacgcgctcgtcttcgccggagtctgcgccgtcgttaccgtggcggcggtctggatgtcctactccttcgccgaacggcagcggcagaagatctacgtgctggacaacggacgctcgctgatggtggcgctctcgcaggacctcgcacagaaccgtcccgtagaggcccgcgagcatgtgcggcgcttccacgagctcttcttcaccctctcgcccgacaaggcagccatcgagtccaatgtcggacgcgccttgcagatggccgacaaaagcgccttatcctactacaaggttctgcaggaaaagggcttcttcaaccgcctgatcgcgggcaatgtttcgcagatggtcaaagtggacagcatccgctgcaatttcgaccgctatccctacgaggttacgacctttgcccggcagcgcatcctgcgcgaaagcaccgtcacggagcggtcgctcgtcacgacgtgccgtctggtgaacgtttcccgctcggacaacaacccgcagggcttcatggtcgaggcgctgaacatcgtcgaaaacaaagacctcgcgacctatgaccgctaaaccgcactccctgcgctgccgcatccgctggatgcggcggtcgctgcgacgccggcatgacgcgctcgcaccccgcatccgggagcggatcgtactcgcggcgctcgtcctgctgctgctcctttacctttggctcctgttcgctatggacatggtaccggagctggagatcgggcatcccgaattattacatccaaaaccgtaaacgttatgacagaaaacaagaatccgggaaacgacccctcggcggagttcgaacggctgcgcaagcgcaaggtgctgctcttcgcggcgatcctcggatgcatcttcctcgtcgcgatgtggcttatattccgacctgcgcccgtcaagcctcaagaaggggccgcggggatcaacacgtcggttccggacggcaaggcgcaggccaccgtcagcgacaaacgcaaagccgcggaacagctccgcagcgaggagcagcagcagagacgcatgatgacactcggcgacaactcgttctcgctgctggacgacgggctcaaacctgccgaggagcctgcaccggcggacaaccccgcactgcgggcctccgaggccaaccgggccatgcagcggcaggtgcagggcttctacgccgctccgcagcgcaatgccgaggtcgaagccctgaaagagcaggtcgcagccctgcaatcccagctcgacgccgagcggcagcagcccgatccgctggaactggccgaggagcagtacaagctcgcccggaagtatctcggcggcggagtggccgtagatgaagaagctgttgagcaggcaaagcagcggaaggattcgcgcctgtcggtcatgcggcccgtgcgggagggtgaggtcgaagcatcgacgctcgacacacgggcggatttcaccgtcgaacgcaacttgggatttctcacggcggcaggtggcgtcgcgcatgccgatactccgaccgtcagagcctgcgtcgcctcgacgcaggtcatacgtgccggaagcaccgtgcaactgcggttgctggaagccgtgcgtatcgacggagtgaccatcccccggaatacgccgctatacagtcttgcgacgatctccggaatgcggctgcaggtcgtggtgtcgtccgtcgaatacggcggacggatcttcgccgtcgaagccgtagcttacgacatggacggccagccggggctcaacgtcccgaactcccgcgagcggacggccctcaaagaggcgctggcatccgtcgggcagactgccggcacgagcgtaaacgtcacccgttcggccggacagcagatgttgtccgaactggcgcgcggaggattgcaggcttcgtcgcagtatgtcgccgggaagctccgcgaggtgaagataaccctcaaagccaaccatcagctattattgatttcaaaacagcagtaaaatgaaaagagaccttatttatctggccctgatcgtcgccgcaatcacggcggtaaaggttacggcacgaacgacaccggaaacgccggcggagatccggcccctgcgtatcgaagcgggattcaccaagactgtacacatcctcttcccgtcgcccgtcacgtatatcgacatcggctcgatggacatcatagcaggcaaggccgacggggccgaaaacgtcgtgcgggtgaaggcggccgtgcggaatttcgcagcagaaacaaacctgacggtcatcaccgaagacggcggatttttcacgttcgatgtccactatgccgagaacccggttgtctcgaccctcaatcttacagtgcaggaaccgcagacggaaggtgtgaagaaaccggctgccgcgggctatccgcagccgacggccccagcatccgaaggccgggtgctgctgcgcgaggtaggccgagagaagcccgcgaccataaaacgcatgttgagcgacatataccggcagaaccgtacggacgtaaagggcattcgcacgaagaagtacggcatcggggtcgaggtgctgggaatttacgtctccaacgatgtcgtttacatacatacttgtatgtataacgacacgaatatctctttcgaagtggatgcacgacagtttatcgtagccgacaagaagctcgcaaagcgtacggcacagcagcagacaccgctcgaaatcctgcgcgtatgcaacgatccggccgttgtaaggggacatcagcgtcagcggacggtattcgcgctgcccaaactgacgatctccgacgacaaagtgcttttgctggaaatcgtcgagaaaaacggagcccgccatcagacagtggagatacccgcaggggaattgttggatgcgaaactcctgtaaagagacaggcggtcgaacccgatgcggaagtttttatgcagcagtgggaatgtttcgaatccgtgcggcgatcttacaggagcactttgcaagaggatattcagacgtggttccgcacgctgcggctctgaaaggctgttcgtttccgaacaatcagacaccccggtacggttttcagaccgtaccggggtgtctttcatgcagcttgaggaaactcaatattcatcttcgttgaagaaatttatccgtattgattatcaatatattatatcataaccaatgaaatttgcgcaaacaaaccgcaccgtctgagacggtctgaggcgatgggaggaaagacggaacacacaaattgtgtagataaattaatagcaaggtctgataaaatagtaataatgttaattaccattaagtaattatcgatgcataacacttcaaaatgctatcatcacattgacgctaatatttcatttcgcttttgtacaaaaggttcgtagaaattttttcctagtagtctaaacacaatatcataatcgttatgtgcggtcacagcgtgttttttggtatttacttcaaagtcatatattttctgtaatgcctcgtccaatgacgcataataaaaattattatagttttgcattctcttattgggtttgaatggggggagaatatttccatttagtttaccttccataagcacgcacttgcaattgcactttgtcaaatgggctgctccatttttatccttatacacccaaatattatcatccaattgaatttgatacttcgcgaaatacgacttgtctgccgtttcgtaacgtatttcaactatattatttcgtcctatcagaatacggcatctcttattaagattttctatctgactatataagcctttaatcgcctcttcaacagcaacgagttcattacgatacacttgagcctcttcttcataatgagacaatgggtgtattaatggatgcaggtacgactttatagtcataattttgaccatatcttcacctgttttaacaaacaaatcaatcaatgccccaatgtgtttcgttagcttataaccaggaattagtgaatagtcatcactcataaataattcttttggtaaatacttctcgctaatcaattcctctaacgcttttctgaaataattggcggcagcaggtaaatcaacggggcgttgaccatgcagatattctttagctctattgtatgcagatgttcccactgtcataatagggacaaaaaatgataggccattatcagtttttggtagagaatataggttaataaatttccatctgttcccatggtgattagtaaggaaattcctagctaggcaataccatgaccgatcatacgttgccataataatctggaaatccttaaactcatgttccaatatatccaatatggcccatctattcgatgagtcaatacctataaaaatatcatccaagaacatcaaatgcaattccttgccaggatttgccttcagagctgctagataaagacaaatagcgattgcagatagtcttgcttcgttcagcccttccgtaaaacctttgattgaagaacttccaattgaaatttttaatcttaggtcttgttctattttccatgcacctttccctttagtcccgtaatcaaaagacatagattttaagtcataatctatatgtagcgcaaaattgttaaaataatgtaccaaataattgtttacctctttaaacaaactatccaagacagaccttaagaccttttcaaatttaacaagtttttggagtcctcgttgatgtcttacttcattgcgattatatacattgaatatatcttgcttgatttgtttccattccaacgctaaagaactatttaatccttgggctgaggcaacatgatcttttaatagatgttcaataaagaaattaaacagattagggttgtcatcttcatacaagtatactttcagtaggtctttgtaatttagaaaaccttttgtcaatgctaatgacttcagaaatgcagtacctgccacacttgtattgtcaacaccttctgcgtatctatatttcacaatattatcaacttctcccgttatatcattgtaatcacctatggttagaattacttcaccggcaactccagcaggtttataacggttggtagtataacttacatgtgaatagaaactctgaataaaatcattcaacgacttatataatgacgtctttccactaccattttcaccatacaatagtacattctctcctttctccattgagaatgtcaatcggtcatagtaagctcgtgaattttctatctcaatttttgtaatctttttcatttttcttcaagagaaccttttacacctttagctgctatcaactcttccatcaaaccaccacgttcatgtataatatgattatatgactttgaaatgaattcttccttgttttggtcgggtacatcttctaatgccatagcactatttatcagcctaacattctgataattaaataacttctgattgataacttcctcgaccatatagtctagcacatttacaaaaaagctactctgaatgtattcaggtgtttttgtataattcatcattttatcaaatactttctggatagatagaggcacatatggtatcatgatatcctttaggctcaccacagaaacattccgactacgaaaatcatattccctatatacatagctactttgcaacatagcagctatataactctgacaaaatcctaaacggttaatatgacaaccataatatgcttcaacattttcaggacgttcataccttatttgaatctgatctttgatcttattatcacgttttacataaaaatccacttccgctgaattcttgagactatctccgtcaaaagcaataaaatccataatatcaccaagacgaatttttacgacctctaaatcttcgttattcttatattgcgtacggaaatcatccaccatcttgataaaatctgtcctcttaatatcagacgacattgccttgaaaagttcttttgtttttactattatctccttttgtttcttgcaaaaattttcccggtctagtccattaaaaaaataccacagtgcataaaaactttgttgggtacgtctattgttctctattcccaacaacatgtcgagatttttgcttagtgttttttcagaactatcaccttcatccgacaacagcaatttcaaattacgaacaaaagtaaattccaaatcatttacagcagcaacaaatgcatctttctttttagtattttctagaacttttgatatgtctccttttgaacgcaggcgaatagcaatacgtccccctatcttataaatatcaagcggtccattttccgttagatcacatccgttctgcttaagatagttaaagtatgaaagcaccgaataattgttttcattctccatgcgcgtacttgttttacgcataaaaaaccaacttgcgttatttcgatacgacgacttaattgtattaatcaagtctctatccaagtacgagttccacatttcaaatgtatcgtccttaatcggatatggcttgttattcagacgaataaataagtctaaaggttcgaaatcgggattattcttttcgtttatttctatcacccataggtcaaagctggtaattttatcttgtaaatcttcatctaattgagcaaaacatttaccattcagatctgttaaaatactgtctttcaacaatagggcaaagccatctttattcgattttaccatctgcccttcttcgtttagatatttcctgcccaaaaaggccaaaatactcagaattcgctgttggccgtctataacctcgcttatgccatccttgcttttaaatataaaaatggggggcagttttatgcctaataatagactttcaataatttcggatgattttttcctattgattacctcctctcgctggtaaggaggacgtacaagaaaacgactgcgagccataagccggcagatgtcatcgatagtatatgtagtaggttcaggtttattgatacgaagctcctgatagttagttgttccaccgtgtttaacctgatttagttcatagttcttatgtttaaattgttcattggtttcaatatatagatttttattgatgccataaaccttttcaatataacaggccattacgttatatctgtcaataatctgctgtgagaatgaacttctcaccatcgcaaaagcacgtaagttatttaaaatgtgcttggaaaactctgttaattcagttgagttctttttaggtaattgtatggcattgtcttccaatatggaaaatgcccaaaatagaacttcagacataagtctattatatggcatttccttattgtctacggccattcgtatctcatcaagaatatcaagtttcttcttgaatgaaacgaacaagtcttcaaactgatcagatcttatctgcgaggacaataaatcatagtacttatcggtaatcttttgcttggcctttgaatagtatttgataggtatcttatggataacgagtaactgacgtatcttctgaagtaacacctccacttttttgtcttcatacttaaagagcctgtcaaattgttcgtgcaatttcagatcctttaacttctccttaaagaagagattcagatcatcatcaaaataaatagctttatctatctcaagattttttaatggagtaatacctgaattgtaacgtttaaatatctcttgtttaacggaatcttcatccaattgtgtcaacccatcatacgaggcaaaactgaactcaatcacacgcaacttagtatcaagaaaatcgttcttgagctgctctggcaatgaaccgaacgtcttcttgtcaatattcaacacgtctagcttctttagaccagctttacttaaacggagttcgccatttaagaattttaaaatggtttcgtagcgttgtcttccatctatgatttctgcaccttttttattgcgaaagaaaatgagtggcggaatctctgtaccgatcagaatactttccaaaaagtatgtagccttctctccatcccacacataattacgctggtaaggtggagcatactgcgttttttttactttatcttcattgaatagactatctatcgtaactactttagagtcttttgccagcctgtttacaaatatttccgttaagttcatattctctttttctataaattaatacgtctagtaaatgcaaaaacagtagttaaacccctgattgttactcaatataatatgcatttacttaatctattattttcggttcaggatcccaataggacaaagatattcatatgcttcgtgccacttggctatttctagaatgctcaaacttaacgagatgcatttgggacggattgatctcgttcctaatatgctatcaatagcgctccaaagaaaataacgtacctttcgtcccatactgaaaaaatgtttaaaatttaacaacaggggtcctatactcacgaactcttgtaaaggtatgaaatttgtcgaaacaaatcctggtttccttaaaaaaatatttttgagatctaaccctcgattttgagaaaaaaacgtaatttatccaaacaaaccgcaacatctgaagcggactgggcaatggaaggcaatagtggataaacaaatacttttgtattcaattaggcaattatagtatatattagaagtctcatataattctaggctatatttaatataacttttgggctgagtagtactctatatttctgtaattatcagtatataaaatagcaatggcaatatgacacaataaagttctcgcaaaaattaaatatcacataatattaaatattcagagtaggtaccaaatattgaggataatcatttaaatgagacttccaacagcaaatagttttttgattctgttgatgggctaattgcgacaaaaatgatttaactgctctctcttgattccgagtaacccatgggtctagaactatttcatcaatcaaatcataccaattgtctatttttcttccaattatattatcttgatgcctagaacaaaattcgctatcaacttgcataataagtcgaacttcttgttcttgttgatatggcatccttttttgcaaaagaaacaaaacctgttgtaaaccggtttggtccattaactgagtaggatttgttatcgtaaacttttcaatagcttcactatcaagatattctactttaccgataaagtatgtcattatattgaatgtgttttccacaagattgtttaaagaataaaacattgcccccaaaagtttccgtggtgtagatctcactttcacccaaatctcgccattgtcatcatcgtttatattgtcatagcagctgttggtatgttgtttattaacttgccattgtaatgacgattcttcgataatagtccagcattgggcataatattgatccgcaaggtttgatatttcaatatccatgtcactttttatactatggactctatcacacttaaagatgaattgctcaaacttatcttgccataaacatggacgtaccaatatccattcatgcataggttcggaataaaactgttgtaaatattcccatttcatataacgatatataggagtatctatatcaatattaatagagttaacccatatctccttctcttttccatcggcagaagatacaggattgccacctgattctataatatatctatgtctttcgtttgcatcaaatggattcatgttttttattctccaatattgaattaatgttcttattatcaataatataatgacgagacttcatgaattgacatcgtagagttcccgtaaaattatggaaacttgattgtctttattacaatctaagattctttaatacaggaaaggatgtagctattcgaaataatagaacattcttttaatttaatttcatttctcttcgcatctgcttcacgttcatcaccggtatacaacttatttgacagttgtgaaaattctgtgttatattgtggatttgcaaggatttcctcttgtatattattgtataagtttattagattacaaagatagtgaaaccaatcggcacatcgaatataattcgctatatttgcgctattcaatcaaggcataatatgaaattaaataggataaaagccgttctggcagagaaaggtatctctcagacatggctggcaaagcagcttaacaagagtttcagtatggttaatgcctatgcctgcaataggatccaaccaaaccttgagacccttcagcaaatagctgtcatcctgcaagttgacttgaaagacctaatcacagacaaagaagaacgatagtagaattacgaactatattaaaaaatgcggaaaaagagtaataatatcggagaatggttcctactaaggtctgttggagacgaatccgtcgatatactctttatcgtgcgcgacaacagcaaaagcctgcctgatgagcttgtttgcgacagcgatcatagcgagttttcccgattttccgttttgcctgagcctcgtataggtctctttgcattgggcattgaacctactggcaggccaagcggcgatatagagaagtcctctagtgtatgcgtctccgtttcggttgatatgccctttgatgtttaccgaagttccggactgttcgtaagtgggacaaattccgagataccgggacacctgcttggcattttggaagtaggtaaagcctccagtagtgatgatgagcgccgtggcaagcgttatgcctatccctttgatggtcgtcagcagcgcgagttgtcggctgaactccacttcgacaagatccgtgagttccgcctggagcctgtcacgcttcttttcaaggaacttgatagtttcgtctacggtatgagttgcacctttgtccgggacaggcagacatgcaagagagccacgaaggttcgacatggcggtaatctgcttagtaagttggcgaatgacggttcttttctgtcggagccgcaggatggcctctccctgtaccttgaaaggacgcgggttcatcttctctccgtacaaggtaatgagtcgtgcatcgctcttatcggtcttgaccgtagagagcaaggctttggcgaagttctttaccttcagcggattctccatgctgacagtaattccggcgacattgagcatatacagcagcaaggcgctgtaattccctgtcgcctccataacacagtggatactgccgtctttggggagagtcccgataaactgtctgataccagcggtcgtgttgttaaaagtacggatctccccgcctttgtcggaggagtaagctaccacgaatgtagccttgctcacgtcgattccaatgtacctcatggccgttcattttttggttttaacgacatcgcttacatcttggtccttcattgcgaatacgggctcagacaccttacgaactatccggattctgatgtaaagagtatggggtcagaacataattcccggtttagaaaaccaatgagagatcggacttattccatactctgatgtcttaactattcaaatttaattaactaattacaaatatacaatgaaagatatattatcatacgaatccgacatttggtcgtgcgccgatttactcatatcatcgggaatcaagcaaagcaaatttcctgattacatgatgccattcttcgctctcatcatgctcgaagggcgtatgcgaaatgaaatggcagatattgaagcctccgagggcctgacccgtgagaacaacctgcaggaatttatcgaagcgttccgagaccgtgagtgtggatataacgactacattgttcgcgaaggtaaaacactgtccaccatttgcaataatgacaagacatttgaacaggatttccgaagttatctggcaggctttgatgggacgctcaaagaattgctcggtatcgagcgtggtaccgacgacagcaaatacctcaatctggacggcatggttgccgagttgcggaagaaaggtattctgatgcagtatatcacccaatggtctcaaatagatctttctcactacaacaactcggaaataaccactctcgaggagcatatcaaacgcaaatgggccgacatatcggcagaaacggccggagagcagtacaccccggaagatattatttcgctgattgccgaaatcgttgcagcgaagatcgatatctccaccgatgactttgtacatatctacgacccgacgtgcggtggagccaacctgctgttcggcgttgtggaccgtttgcgcgataaagccggctacaaatatatagctgctcacggttgcgactggaacgatgcactatacgcattggcgaagatcgaatcgttgttccgcgagaataccgaaatcaaatatggcaataccctaacctctctgccgttcaagggcaaagagtttgacgtcgttgtagccaaccctccctacggaattccgtggaaaggttatgagaaagagattcggaacgaccaaaccggacagttttcattcctgcctacggtgagcgacgggcaattgctcttcttgcagcataacgcttggcatctgcacgaagataaaggtattgtcgtagaagtaaacaacggctcgtcgctgttcagcggtgatgccggcagcggcgagagcaatatccgcaaatatcttttcgacaacgattgggtcgaggccattatccaaatgccgtctgacgagttcttcaatacgggtatcgtcacctatttgtggattctcaacaagaataaaccggcagaacgaaaagataaggtaatccttatcaacgcagccgatctttggcagccgttgaagaaaaacaagggttcgaaacgcaaggagatgaaccccgagcatcgtgcagccattgtccgtgcattggttgaattcaaggattgcgctattgccaaagtttacgacaaatggcatttctatttcaacaagcagtctgtcgttcttaccgagaccgacagcgaaggacgctatgttagtaagacactcaatacagacggaaagccctataatatcaagaacattacgtcttactgtcaggatgggacttggatatggccgcaggataatgacgccgaatcattaaaacttcgaaactctgtacttcaccatttcgggatcaatgcctggtctgtcgtgatttgttccgatgcgatttattgggtagataaagaaaaccacgaaatcatgcgcaccacatacgccggagagcatgagtgtctgggtaatggtgctatcaacgtacagttcggctataataaacgccgggaagagcataccatatctgccaaaattgttgattgtacgaccaaggactcggagattattccgttcgaccccaatcccgaagtcaatgaacaaggcatcaaggattttctccaacgctatatctacaagccctatacgattggtgagaatgtcgtgggtgtcgaggtgaatttcaacaaggaattctatgttcccgagaccgttgaaccggtagattccatccttgccgaaatctcggatattgacaaggcaatcgcaaatcttgaaaaggaattagggttatgatctctatttttactgtatattcggatatatgcaaaaaatcggcgcctgctcattggcagatccgtcgattcaaagacatcataacctcatctcgaagtggaatatggggtgatgaagaaaagggagatgccaatgatatagtatgttatcgtgttgcagatttcgattattctaatctatgtcttaagttcgacaatattacatatcgcaatgtattgccggaacaagctaatgagaaattgctgtctgaaggcgatttattgttagagaaatcaggtggtggagaaaagatgcctgtcggacgtgtcgtgcttgttaattccccgcaaagggctgtatgttctaattttattcaagctctatcggtgaataaaaagcaatctgcgcggtttgttctatatttatttcattcaatatattccaaccgaataaatacgttattcttcaaccaaaccactggtatccaaaatctaaaaacagctcattaccttgcccaagagatttttttaccaccttattcggagcaggaggcaattgcggcatatttggataaggagtgtgagaagattggtcgaaaaatagaactgttggagcgcaaagccgatgcttacagccgacttcgtcgctccctgatcaaccgcgccgtcacccgtggattggatcccaatgtttcattaaaaccatctaatattgagtgggtcggagatattcctgtacattggacaatatcgcgatttgcatatttttttgcggaacataatatctcaaacaaaggggtgaatcatcaaaaccttctctccttgagttttgggaaaattattcgtaaaaatatagactcctgcgatggacttttgccagcaacatttgagacttatcaaatcgtagaaccgggtaatataatttttcgttttactgatttacaaaacgatcataaaagcctgagagtcggtttagttaatgaagaagggatcattacatcagcctatacttgtgtacaagggaataaagagacattaccaaaattcgcgttctacatgctacactcgtatgatataaaaaaggttttttacaaacttggtggaggaatgcgccaatctttaaattataggacaataaaagacatgaaagttgtctttcctccaattgatgagcaaaaagagattgccgtatatctggatgagaagtgcgcaaagattgatgccatccttgaaaagataaataccgaagtagagcgtctgaaggagctgaaacgctccctgataaatgaagtagtaaccggccagcgagccatcgagacagaatcgcgctcctaaaactacattggattatgaccgaacttgagttgcaaagtgaatatgtaatggactttttctgccgtcgtgcagatggtcttggttttcgtgaaataaagaataatgccgtttcgcccgatttgtttattccggccaatctgtatgagttcctgaaagagaattcgcgcaaggcatggaacaacctgctcaaaaagagcgaatacaatggcgacgagcaaaaattgcttcgggccattatggatatgattcgcgagaagattgaggcgagtgccaacgtggcaatcttcctgaataaaaaccgaaccattacattcgaaggcgaaactctgcaacttatttatgtcagtggttcggaattgcgcggcgatgaggacttcaacaaaaacatctttgcggctgtcgaggagatgagttattcattccaccacgacgccaaaaagatattcgcatttcgccccgacctgtcgttctttgtcaacggcatttttctcggctacgccgaattgaagagcaacttcaccaatcagacggctaaaacgaacggcaggaacaaaatcattaccgactacctcgaagccgtgtgggaatataccaagattgccaatggcaatgatgtatcgcaaacgcttcgtcgtcgcatgctccggccgtttgagaaatcgattcacctcgtaaccacggacatcacggacacatacatactgcgggatccgggacagttctttgatgaagcaaagcgaggttttcaagataataccatctcgatctcttctttccgtccggtggtggagaaggtattcaaacccctccccataaagcaggtggaggcaaccgatccgcgcgttcgcttcgaagaggcaatgcgttcgctctactccaagaagatgatcgagaaagagatcctctactacaacttcatggcctacacctataagaccgtaacgtctgttgtgaatggccataaagtacagaagaaggagtataaggacaaaacaggtcgtctgatatgtccgcgtccgaagcagaaattcggctgcgaccggatcatggagcgtgttcaggaatttctggaccacgaaaatgaacccttgtattttatcaaccgactgcgggccgaactgcaagcactcaatgcgccacaggacctgatagaccgcgtagtggccgagagagacagttattgcaacaacaaatatgtctattcactcttgttgcaatatgctgcaggattcggcaagagcaacataataggttggacagcgctgcaactcaaagatctgcgttataaaggcgaatgggtctataacaagattctgctcgttgtcgatcgtttgcaattgcgcgaccagctcgactcgatgatgctcaacatgaacatcgacaaggccatgttcgtagaggcgaccgaccaggacacctttgtgaaggcgttgagcgacaaacgccgtatcatcgtcgtgaacattcagaaattctgggaactcaagaaagccatcgaaaaagccggcaaggatttcaagaatatgcgcgtggcttttcttattgatgaggtacaccgctcaaacaccgatgatgttcatcaggagatgtattcggcgttcgatgaactgcaggacatttttgatgaggacggagggtttatcacaaaaggttctacaaagaagaatctgattgtcggtttcacggcaactcctagcgaccgagtattggctcgttttggcgaatttcacagaagtaccaactttattaatcagctatggaagccattcgattcatacaccatgaaggaggccatagcagacagttacattcttgatccgacgaaacatattattcccgtacctgcaaaaatgtattttgaactccccaatggcgttatgcaggctataacggcagccatgaattcgggacaggaggaacgggtatcattcgccaaaaagcaaatatacgagaacccggaccgaatgaaagcaattgccgagttcgtggtcaatcggctgctttcattggtttacgggaaaattcgtggcacgggaaaagccatgcttgcggttagctctattccgattgctattcagtactgtaaaatcattcgtcggttgatggcggagaagactgcatcgggaacttttgccaaatattccgatgcacctgtcgctatcgtctactccgataatcaaaagtacgagaaatgttcgtcgatgaatggcggtgtgacagaggataaggtgatagacaacttcaagacggcaaaaaacgggcttatcattgttgttgataagctgcaaacggggtttgacgagcccaagctacacacgctgtttctcgataaggagattcgcgacattaatgccattcagacaatctcgcgcgtaaatcgcaaggccaagtacaaagaagagtgccatattatagacttctcatttggcaacgtcaacgaaaagaatattcgggatgcttttgccaagttctgtggtatggttatcacggactttgatccgcttcgtgagaaggcgattattcaggagctgtatcgagaattattggcacaaccaatctatatcaagtggttcgagcgatataaatcgtctgtcaataatgcagaggccaatgcccagctatgtctcgatatggacgctgacattcgggcgtggatcaagaatgtaatggaggcgcatgcacaatacacgcaggatcttaaaacgcatagcgaggaaacggcctccacaagcgacgatgatccagcaaaagcactacgcaaaaccatcggccggtacaactctctgctggttctcttgcaaggtgtaatcgaattggatgctcaatttaaagatgccgtatttattgacttctggcagcgatactgcaatatttatcgctctatatttgagcagaaagattctattggctcaatacacaccaccttcgacggagaaatcgggttgctcgtgagtgatgaggttgagattgaagagcctcaggaacaagacgacgctcccgaaaactccagaagcaagaaaaatacgggagagaaccgaggtggattagcctcgatattcgatacccttgcccgactaaacgcaactgagcaagaacgagaacaagagatacaattctactttacaaagacaaacgaattttatgagtttctaaagtccgacggacggtttatggcaatgttacgcagtccgaatttttcgcgtgatgaaatagaaaaagagtacaacaaactgattcgtcgctttcttcgccaggctgaagatgttaagataaagaaacttattgacgagaataaggagatgtttcttgaggacttcaagaacaagatagtcaatgaatgagactgtaaacttggggtatttagtaaagaatttcataactttataaacacgctttagtttacagtccccttttattcatctcgaatagacgtcttatctgcgtatagacttcttggacgtgttgttgactattcggatagcataaagtagacacctcctccgatacgcctcttcctcctcatccggccttcttccgtcccagcgaaggtctgagtcggcgttgccaccgcctccgctggatgcaacagcgacaggttgtccgccaatcaaagcatcagcgatagaaaagattcgttcccgcacagaaggctcagccagttggtcaagaaacgtctgcatctgttctgtctgattattgttgagatccgtcagtcgtgcatactcctgttgtagccatttaaactcccgatagtccagcaacgcattattctgcaccgcctgtatttgctgttcggcatctttccgatacagttcttcaatctgacggacaatcttcacgaatcgtctggcgatagaccggttctgctcctcaatccatttgtcgaccccgaatatcggaggtttaccagtgattcgtggcggctcaaaatctatcttgtgattgcggaaaggttgcaccactctaccgacacggtctatattctttgtcatcttctccagttcctgctccttttcttgaagcttacatgccttgtcttcaagtttggcctgatactcggcaatgagtttcagtatgtcggttttctgtacttcatacctattgagagttatcttgccggacgccagttcctgctccgcctttgcaagttgttggttataactgaaaatctttgcttccaatctccgtatcatagtttgcagccccttgactgctttctccgcctgtttcgcatctttggccagtttccggatataatcgcgtttactaagatggttgacgttccggccttcaatactgtcaccacgttccaacccgtacttgctccctacctcttcatatagtgaggtgtgcatttcccgaagaatatggccatactcataacggctcttcccgaacttagccgaccacatgacgcattcgcgtccgcttttggctcgttgtccgacaggaacaatcaaggcatggatatgtggactgctctcatcaaggtgaacctggaatcctatgatgtttttctgtccgtaccgtttggcgcaccagtcatagacatcttttgcccattgttcgatttccggacatcgttggagatggctgttgtctgcgcccttgtccagatttacggtttgggggccaaatgccatctcaagcgtacggtcatgattacctccgaagataaatttcgcacaacagtttggttgaattttgctgtccggcttgaaaggtttccagcccagttcagtcaaccgttcctgcaaacgtacttcaagcgatttctcttgatagcctaacggatgaactttcccatcgggcccaatctcgaaattcagtttcattcgggtcttgtcatagtgattggtcggatcctgattctttctgtcaatcttgtcgtcattccaatgcctttcgttttcattcgcctctgatgtgccgaatgacttcccggcttcaacatgcatggcctgtttaatatctgtattcatatagggtattcttttgataaatgattaatatttgagcttgctcttgtgccagtccgctctgcgggacaatgaccggattttattgccgtcaggtaaaaagtccttattgggttaaggactttctataaatcctcggaacaagttcctttactattcaataagttccaaatccagttcatcaatgagcaactgcaatgttggattacgttgtatcatctgatggagtatctgtctctttgatggtgaatacaggaagaagtctgcaatgtccaatccttggctgcgttgctcttcatcggatgtacattccaaaacattggacacaacaacccgtttgcatattccagacaacaaagcagacttttctttccattgttcggttgctcctaaatcagggatgagagtaacctctctgcctttgaggacctgcatggcttcactattgaaacaaccgttcttaccacctgttgccagccatatataatcggggataaaatggctcattacaacagcggtcttttcactttccaccagcattaccggagacgatgaatttttcagaagatgttctccaaacagacattgcttcaaatggaaatcctgcaacttcaactcggaatgtgcccagctgacaaaagcctgaggctctttaacccgatggcctgtctcggcattatagcacattaccttgccggttcttacctgtccatttatatctgtctgccagaaaaccgttgcacctccccattttgaagatgtccctatgcgatacatttcaaacaatctgcttgcctcattttcgccaaatacatgacagaaatactgatataaggggttgattgaataatgtaacagactccttaacacataagatgaaggaatatacgaaggggcaatacaagacggaattttatctgccgtcttataaggggcagaaaaaagtgacttgccgcgtccctcatccatttctaatacatcaggattatccttgaagtattccttaggtgtatagtggtagccacaactgttttcatgatcacacttgccgacattaccgggaaagctaatgctgccttgttcatcaatatacctgacaaaacatcggcttttaccacagttcggacaagtagtcttgcttccagggcggtatttctgcaaatggaatctgtattcactcatggtcttctgattttagtgtggttgcactctgcacttttgcactttgagaagattgcacggtatcctggcaagatgaaagtgcaatagtgcaaggtgcatcagtattttctgtcataagtttgcgatagactccatgctgaagcttttctataagagggtgtttaagccggcataattggtcaagcgcataatagacggtacgtcgggacatatcaacttttctaccggcaataacagcatccccggaagtgaaccgatcttccaacagagaaagccaggcttctttcgtttcgccgatactgtttatgacaatggtttcctgaatcctcctgtatgtttcctcataataatcaatcatacggatcgccgattctacggaatcccgctcaatatattgcatatctccactatcagtagcccatttcattacctgaaacaacagggcaagacgtgctacatggccgttgagtttcatcttgcggctttcaacatccgcatcatcctcaatggcatttacagcatcaataattccattgtaccattcataaaagtgttcttccgcatcatcagacattgtaatgatacgaggattgaccgtagtacccttgtcatcaagaatacaggggatgcttaagattctgttgattattgtcctccattgattcatgatgtcaggacgggccgtattccgttcttcccgtctccatccggatatcttcctgtttttgggatagacaaacaaaaaacggtcaagcaatccgttggcaaggaactctgcacggaagacttcctgcagcatattcgtctgtactgaaccgatgacatttatacatggattcttgattagaacaggacgtgattctgatttgcggataatctttaacggctgtccgctataagctgtcagcagatcttcaatgaggttgttcttgctgttgtaccttttgacggaattgaacaaagccaggatttcatcgacgaccaatgttatcccacgctgattatgctgatgaatattcatcatcgcctccggggtggaatcataaatgaccgtcgttacaaaattcggtttcttgagcagttgttcttccccgtcacttccgtgcttgcctgcagacatggctctttcatattcgtcatattcctcgttgtatttctcatgcagccggtcatcatactcattaatcggcttatagataaaaccgaggggaggagtctttccgagcccgggacgtccgaccagcatcatataaagggatgggcaagttttccactcgccctttatacggatatgacaagagttgcctattgcagtagcaacagcagaaagaacaatagacgcagtatattccacattgaaattttcgtatctggcaagattgaggataatctcctgtatcttgtccgggaaggcatccaacggaagacctgtttccggaacgccttccacttccgaacgaagcatgttggtcaaatgaatggtgtcaaacatagccacctccttgctgttttggaagttcatcaccaatagcgaaagcttcataatggaaacgacgcagaaagcggtctacgtcttcctgcgtgtaccagtatttatcaccttcacgcgagtagccgagatagccgttgtctcgcaactttttcagatacttttctttgatgttcaatttctccatcaaagacttgttgtcatatagacggtgtccgccttcatgagccggaggcggcagtttctcttgtctctccactatgctgagaatcttttcaagcaattcccggtcgcatagcttctctacattcgtttccttagccatacttaaaaacaattatggccgattgccctgatgcacactcagaccttcagcctggttatacgatatggtacgattgtgcacatcgcaccagaatcacggcacgaatgtatgaaatagctgaggactaataagttacaataaattatccaatgttaggacaggtgttatggaaagttatgattctgccacaactttgtatgtaaccagttgattaccagtaataaaaaagagaaaaataaaattgaaaaaatcgaagattgccagatgaagcaaaacaaaatgcataacaagcccgaagctaagatctgccaagaacaaagataatactcttcgttttttgttacttctgaaaaaacttatcgatttctccggcattgttagggacgggcatatccctcctgttctgtcgggactgtccgataccggtctgctcaaatagtgcgttaagctctacatcgggaaagagtccgttgccgaattcccaaaaagtcttctgttcgtatttggaatattcaggataatcgccgcaatatattcgaccacacatataggcaagaagagcctttgtccctttccagctataatgggaccctacctcttcaatatatccggcttctattgctttcgcaaaaattgtacgggcaagtgaagtatcaagccttcccgacaatacaacccctttgggggaatcagaacattctgactgattatctatggtttgaacggtttgctggttcttttccctaagtttgatacgcagtttttctgctccgtatgcaaatagccccgataagacaagggcggtaaagatgcctgttattactacaggatcaggacgattgtcctttataggatcaattatcccaagtcctataaggagcagagttcctataaaaaatactattgcggctgaccacataattatcctatggtacttattaaagatggtagaaagcagcaataccagaacaaatgcgcacaccagcaatagaaatattttcgtaatagtcatatcaaatcaattttaggtgtaaaattaatgattgtttataatagccatctacaattatcagagaatttcgagataagcaaaatcctctttcagacgtgccacttccgccgacagcgtttcgggcaggaatttggcataaactttttcggtgacatccgtacttccatgaccgagcaaacgactgacaaccgacatggaaagtcccttgttcagtgcaaagaccgcaaatgaatgccgggcgacatgcattgaaagggtaaacggaagccctatctgttctccgacaaccgccagcgactgattgatacatttcgttgcattgttacgggctttgtacagagcttctgcatcatcaagatccagatcgtcctttactaagttgaatacataccggcatccggcacgtttctcctgccaccggtgaagaatattcaaggcaggttccgtaagaggaattacatggcgcttattcgtcttgatcatgatttttctcagttccttcttctcaaaattgacatggccccactgcaatgtcataacatcgacaacacggagtccacaggcatggaaggcaaagaagaacatttccaaaaattccttacggcgcggttctgtgaacaggtattgtaatattccaacagcgcagacatctgttcctttgaaaggtacttgccgtcaaactcgttgtcttcatccgcgagagatatctttgaggcgatacgcatatcctgaatcctcgcattgacggcatggtctatcatcttcatttctgaagcataggcacatgccttcagaatcggagtcaaagcatggttgatcgttgcatcgctgttctgttttatctcgcggcgccatctgatgtattcgtcaatcagttcaaccgatatttcacctaaatagatactgtccggtttataggtaccgttctttgttgcacggagaaagatacggaaaatattcatgccgctcttgccgttttcatagcggctgcgtccgattcggtttctcgaataatctgattcaagcctttcctgaacaaactcgataaaatcctttcctttgtcctcccgtgtgagcggtttgtcggccagaaagtcggcgatcacctgtgccgtaatctgattgggatgtttttcctgatattcggctagcaatccgtcgatcttgtccgcacgggcaagcagcaggctgttgatccggttggcctccggaccataacttgccctcacacctccgcgtcccttgttggctttctcattccagtcgcccagccggacaaagatgttcatacccttgcgtatcacctgtcggttccaggtgtattcaagctggacaagatactgtttagctggatcgatctcaccccggatatgcaggcgatagcgtcccaaaggatatagtcgtttcggtcgtcccatactggagatgtttgaaattaaaaaaacagaggttgcggtaatactcacaaacctctgtaaaggtaatgaattttgtccaaacaaatcccgattttccctccgaaaaacgtattttatccaaacaaaccgcgccatttgaggcggggaaacaccgttgtccaaacaaattaaatccctgccaatcttattgattgacagggatttaatagctgtttttgtgcttaaaatcgcactaatattcctcctcgttgaagaagaaatcgtccttggaggggtagtcgggccagatgtcttcgatagattcgtagatttcaccctcgtcttctatctcctgcaggttttcgagcacttcgagcggcgcacccgaacgtactgcatagtcgatgagttcatctttcgttgcgggccagggggcatcttcgagtttcgatgccagttcaagtgtccaatacatgattcggtaaagttttatctctctgaattttccggaaaaacaaggcttttccttacagggatgcaaaggtaaagcaaaaaaacgatgcccgcaaacggaacgatccccacggcctacattccggacgttcgaatgtcctaacatccgatttctacggatgtgtccggcgtataggactatgcggtatcccggggagaagaaccgaaaatcgcaacgagaattccgatccccgcaaaggttcgtgaatccgaaccggagatatgtcgccgcccgaggtatccgggaagacagcatgccgccgtacagccgccgacggactttttccagacactgacagcgtcgtaaagaatttccgcaatgtaaaatcggatattatccggtataacctatatggaattttcgtatctttatggaaacctaaaacctatcgaaccatgaaattcttcatcgacacagccaatttggagcagattcgcaaggcgcatgaactgggcgttctggacggcgtaacgaccaatccttctctgatggccaaagagaacatccggggtacggagaactgcaaccgtcattacgttgaaatctgcaacatcgtcgaaggggacgtgagcgccgaggtcatagccaccgacttcgaaggaatggtgcgagagggtgaggcgctggcggcactgcatccccgcatcgtcgtgaaactgccctgcacggccgcaggaatacgggccgtaaaatacttcgcggcgaagaatatccggacgaactgcacgctggtattctccgtggggcaggcgctgttggcggcaaaggccggagcgacctatgtatctccgttcgtgggacgtctcgacgacatctccgaagacggcgtggcattggtagcccacatcgtgaaggtctaccgcacctatggttacaaaacgcaggtgctggccgcttcgatccgtcatacgcagcatattatccagtgtctcgatgcgggtgccgatgtggcgacatgcccccttgcggcaatcgaagggctgctcagacatccgctgacggacagcgggctggagaagttcctcgcagaccatgcacgcctgaatgcctgacgggtcaccggcagcgataaaacggcaacgccccgattcgaacatccgaatcggggcgttgtggcaatcatttcttttccaaaagccgctggaaggcgggagaaggcttaaatgcaggaatgtcgtgtgccggaattttgatcgtcgtattcttcgtaatgttacgcgccgtcttttctttgcgatgcttaatcaggaacgtaccaaaaccgcggaggaaaacgttttccttgcggatctgtgcggctcgcacctcttccatgaaaccttccacgacggctaaaacggtcacggcttcgacgcccgtttcctgggcgagttgctttacgatatctgctttggtcatttttgtaagtttttgtccgacaaagataaacaaacttccgaactgaaaaaagcccatcgacaatccgatgattataccaacaggtttattgtattgccgcagaacggcgcatcgtgatattagaaaataaaaatccgggttcggacatttttaacatggatacggattcatctcttccgaccccgtttcatagaggtcatatccttgtcctccgctacgggacgtttctgttcttttaacggccactgcgaaaaaatatgctcttggcggactgtcatctctttcagtcgtcgggcgatctgtttccagtcgtattcgaaattcagcatgacgatatcctcaccgaaatcgatgtcatcgaaatatgtgagtgccttgaacgggcggatgacatttgcctgcggaaattttcgttcgtagcatttgagcatctcataaaacgggatgcgggtggacagacaggcgatatccacgaaatctttgagccgcgaaccgtcgtcggctatcgcagacagcttcatggcgacgatatcctcgatgctgtataaacggattccggattccgcatagggctgccggagatatgcatatttgtgagctatgcagtcgatcttaacgccgtcgatcatgcctttcagcgtgtcggggcgcctgaaggccgtttggaatccgtatcgctgcgaaagaaacgcttcgagttccccggcgtcgaacgactccggagtgaacagatccagatcgacactcacacgatgccccagatataaggccaaagccgtacctccggccagattgaacgccgcaagccggggctcggcctccaactgtttcaacaacccaagtgtctgcggcgcaactgtctgcgtgtgtaacatctcaattcctcttttttaaggccgaaagccgtacatacgaaattcatatcctgcgccgagagtgtcggaacctctttgataatttcccggaagccttcgatgcctccgtagaggtcgaacgccgcgaagtagtcccggagccatccccgttctatgatgcgctgcacgacgaccttacgcgaacgctgccagtcgaactgcgtcaagtcatagtcccaaagtaatgtctttgagaccttgcagcagcctttatttcggatatagtcatcgaatatggtcatgagccggagttcgtttcgttttacaaagatacggataagccgagagtaaaccaaaacttgttttgagtttaccgaggcggagtatcttcggcgaagccaaatatacgaattatcctgatgatatgcaatttccgtgctttgtccggcatacgccttcaagagttgtgtcttatcgctcgtcattcgccgcagcaaacatgggacaaatcggatatacactccccgacgaaggtcggatacggtggtacggacatctccgaaccgattgtccctgtctgcagcatagcgcaaaattttcatacgcataaataaccggtttttcaggtgtgggtcgcccagccgtgaaagggacggtcgataaaacagcacgaccgatccggacatccatgataaaccaatccgccgacaacgcccagactcccgtcgggatagcgttccttgaagaggaacgaatagggcgcgaagtccctgtaaagttcgatctggcacggatgatggggattttgctcacggcgttcgaggcgctccaaacattcccgaagcgtgctgtcgccgatgctttcggcgtattgcactaccttatcgtagtgctcctgacacatgattttcataaggcttgatttttaggtctatttccccattccggggtgttgttccagaaagagcatccgctgccggatataatgcagcagcggttctccgtcgccgacagattccataatgttgttcgttccgccaatatccttcagcactttcaatgagaaagagttgtgtatctgccccgaatcgaactgcaaatcgtgtccggactcggtaaaggtgatgcagacaggtcttccccgctttgttctgccgaaaaccgtgatagcaccacgcaggtctatcggataaaactcgtcgttattctcccagtcgatctcaggagtcaggcggacgatctccgccatgaccggacggagcagcccttccgtccaatgcggatcattcaaccgctcccgttcttgcttcagatgttcaatctcccgatcgatctccttgcggcgcttgtcgcactgcgttttatgcaggcggtagcgcgtaatgatattctcaatagcattatattatgcataccaactgcaccgcaggggctgcccgtcccatttccacgcagtacggtatgagtcgatgcggatataatttttcgacagacggtgcgtatgggtcttgcccttgaaaacatcgggcagcgggacggtcgttccgcacatatagccgtcttcggtagttcgctggtcgagctgccgcaggtctaccgcgctgccgcggatcgctatgacctgatagaagtcgatattggtctgctcccagccccacgacgagtagaggatgtcgccgacgcgcagcgaacgtcggaactcctcactcgaccgcgctacggcttcgtcatggcgccggaagcgctcggcctcctgccggatacgctccatagccttatcgtattcttccggggtgtgggccttgtagacataccgggggggggcgcttcatccccggtgtccatgccgcgatacagcggccgttacggccctgaaaccggacaagcgagatgttatagatcaattcgggagcgaagcccgtcccctgcgcgagacgcgcggcgttcttgttgatgcgataggttttcattgtatttcggatttagggttcgtttcttcttcgacgatttggaacttgtcgggattccagccctttgcgaacagcgcggcctgcgcgtcgaggacgctcggaaagatgcggcgcctctgccgcgaaaaagagatgtatccgacataaatacgccgcacagggcttctttgatattcgaggtggcagcggcacggaacgggccgatagtgcaggaagccccgcatgcgcagcagcaggccacgttcgtactccttgtcctcgcggcagcgttcccacgcctcgtatttgtcgatgccgtcggtcagcagcgtgtaaccgacagcccggtcatagcgggttcggccctgccaaaggcccttgaaaaaaagcgacagcagttccagttcgagcgtcggacggcctttcgtgcgcagcgtttctgtcagggatacgacctcgtcgtaacggaagtcgagcgggcggatgttgttcgccgccatgcgcaccatcacccgcaggtcgggggtaatagtgatacgtgttataatctgatagctcataatgatatgcaattaaaagaccgcagctttagggctgcggcctgatttgacaatacgtgaaatgtcgtgttatttcggattggtcgtgtcccggagcttcaatccgaaatcgccgcaggccgtacgcagatcttcgctgaacttgctgctctcgcaataataatcacccatccgtccggccaactcctgcagatcgccgtccgtaatcgtcgcagtatcgtatccgtgtctttcgagtgccgcacggttcagaaaggcgatgtcgaactccgcattcggatcgtccttactcggaatgcttcgcagcttctcggcggtgaaccggtaaatctcgtcggggtactccttctccgtccggtccgtatccccgtgctgccgggagaactcgtcgccccaggcaatgagcgtcgcggccgtatcgcgggagttgtccgagggccggaacttcctgcgcccggcttcataggcgatatcgaccagcacctcggcatagtcgcgcagggacacattgcccggaagcgctgcgggctgccttttcataaaggcggtgatggcctcggcatagatccggagttgcagacggtcgcgctcctctgcggcttcgtcgcgatccagcccgaattccggggattcatgtccgtcgaggaagttctgcaactcgcccagccggaaaacgtcgtagcgcgtaggatattccggcaggcagcgttccacgaaatcttccgtaagatcgcttgtcgtctgcggcgcagcttcggcggacgggatgaaatcgtattcttccagccattcgacgatgccttgcagggtatcgcaggagagattttcaagcggaagcgggaaaccatccccgccgtccatcaggcagacgggagtcagcccgtcctcacaaaattcgagggagattacattgcgataaagaccgtcgtatctgattgtaaggggcgactcgtaatactcctcgtaggcgaggccgtccgtatctgccagccgctcgcggtctgtcgcatcggccagataggttcccaggcgcccttgccggctggcgatgaccgaacggatgacaccgatctgataagtacgcagtttttcgagtgtttctttgtttttcatagtcatagagaatcaagttatttataagaaaattccggtctgacgaaatagcagaccgcagtatgccgcccgtggtccttgacgagtttcacgggttggagcgtgttgtagatgcgccgctctgtaacgggaacgtcgagcgccttccactccgtccggggcagggcgacctgctcgtcccggtagccccagacgatgaccgacttcggattgggagccgcgaataccgttccttcgcaatcggagagaaaccgtcggaactcctcctccgtccggaacgaaatacagtcgccgcggtaaaggttaccatgcaggttctccgtatctttgtaaaggctgatcttgcgccatttctcggtggagaaatcaccgtagagcggatcgccttcccggaattcccacagcggcacctcggcgcagaaccggacgactccgttgccgcaggcgccgcaatggccccaagcacagaaatcccccggcatagcaccggaaggcttcagttcttgcggcatcacggctgtaaaaggccctccgctgaccgagcagccgataccgtcggctgtcgcccacacgaaaggcacgtaagggcacaggcagatcgagcgcattccgtcttcacggaccgcctcgatcaaggcgttgccatggaagtcgccgtggcgcgtggtatagcgcacccggtcgccgacctgcgggacaagcgggttgcgggtacgttcgatatgacgcaccaaagcattggcggcatctacgtcctcttgcgtcaggcaatgttcatggtcgtaaagcgtattcatcggcagcagtgtttcgcggctgtaccgatcttcggttttatcttgttgcatattgctgataataaaaacgccgcgacctttcggccgcagcgcagattaaacgatttgtttatcaaggtttaggcagcttcggacggaatcgcatccggggtttccggctcctgctctacagccagccgttcggaaatcatgcgtgccgaccggttcacgtccgtgaggatgtcgaacaggtaggtcggctctttatggaactccgccagccagtccttgatataggcagcgctctcctcgcggggcgtcgtggcgaagcccagcatcgcgccgcacagggccgccgtaagttcggcgaccagttcctcccggatataatcggcatcgccatagcaagcgccaaaagaacggttcagacgctccgcatgccccgtgctgtgcgtgacttcgtggagaagtgtcgtgtagaatgccgcgccctccggaaactgccgtttttcgggacagacgatccggtcgagcgtcggtgaataagaagccctgtcaccggatttgagcaggatgggacagagccacgactgctccatcagcatccggtccagcggctcgcaagccaaaccgtccgagtagtctttcggcccggtcggtgtcgtaagcgaggaatatcgctccggatgccgctcctgcatatccgtctggtcgatgttgaagaccgggtaatagcgcatcacgggcagcacgtcgtattgccgccgctgctcctgcggcaggcggtagtattccgccagttcgatctttttgcgggtctccttatggcggatgtacagtttccagaagaagaccggaaacgacccggagcctttgaggatattcaacccctcttccttggcttgtttgaaggtcataaagagcggcgtacgatagccagcgatctccgagaggaacagcagcatcaggatattcccgccccggtagggcgtgccgcgcagattgcgcggaagaccgtgcgcaaggtcggcgatccacggcttgcgccactcctcggtgagcgtctccattttctttatcatcagctccgtcaactgcggagcgatcttttcaatcagattcttattcatggctcttatctttacgttattcttcctccggagcggtagcttgccgccaaagacggatcttttcgtcgttcgtcctgccgttccaccacatgtcgcaggcgtcgcggaaagccttgcgatcatccttcgggctgaaattttccggattcagtccggtgataatttcccggtcttcttctgtcgttccgtcattccaccacggctcgaccgtatcggacatcaattcgctctcgcgtacctgacgggtgtgttctgcacagtcgtcgcaccataagtcatctttgtcttccgccatagactgtacttcgtacgtgttgctgtccacccagacttggcaggatacccgcagcgaaccgcacgccccgcagcgccacggatcggcgggcatctctactgtcggtttttctgcaataggtgtctgttccggaatctctgaaatcttattcataacagtagtaatgcaaagacggagcaggcataacctgctccgtcggtttggacatttagttcatgttgttactatgccgccgttttcatctcctcaggcatccggatatcgggttcgatatccgggtccataggaataatcagcggctccggggtgggttctatagcgggcgtctcgtccggcagcagctcgggcatctccggttcggcatccggtgcctcctgcatcgaaaccgccatctcctcggcctcggcttttgcctgcaaggcgtcgatctgttcctgaagacgggctttgcgacgctcgtagactttcagatactcctgctgcaccttctggctctgctccgagaagttcatatccgcgaagcggcacatcattcccgtcagaagcgtttcgtccgtacagcggtactccggagccgccgagcggaagtagtccaccagataagcgcgaaccagcgccgcctgttgcttggccgtgatacgacccgccgcagcgaactgctcccggtcggtcaggcaagagccctccttaggccggaaaccgcactggcggagtttcgagtcgctcattacgcgctgcatcacggcgtagtagaacatctgctgctcctctttctgcaagggcttgttcgcaactttcacatcgaggaagacacgcttcatatcggtcgtgatatgctcgtagcagatttcccggtaacgacgctcctgttgcaacagcccctccagcggcgaaggcggaacgacggtgacgaagaccttatgctcatcgtcctgcccctcgtttaccgtcatttcccgctcctcatcctcgatctcttcgtagcggaactcgatatcgaggttaccgatgacggcgtacttgcgcacgcgcccttccgagatgtcgaactccaactgctgtgtctcttcggcgaatgccgccatttcggcttcgtactcctcctgagcctcggagaactcctcttccgattcgaactcttcggcctgcggagcgtcgggcatctgagggcctttatcgtagtgataaacgctgtattccagctcttcgacgtgatagccctctttctcaagagcttcgagtactgcggcaggcgtttcgccgtccgtagccagcgtcgtacgcggatcgtctttgaggagtttcacagccttctgtaccaaaaactcgttgttcttgcggatcatgcactcgcggttttgacagcccgcgcagccacccgcgcattcgtccttgaacaacacctgattggccgtgttgtgctggcaggaaaggcactccgtcttatcgaagttgtagctttccagcttggtcatataacgctcgtagagccgccgggcgatctccttgatccgcgcggtcttccacgagctgtaacacccctcggcgaaatgatcgtcgtagacctcctgctggatgtcggcgggatatttggcgatctccgtagcgacgcccaccgaaatctcctccttgtcgagcatcccggccagggcatcgatcagctcgcagagtttcagtcgcgagcggatgtaggcttccgacttgccgaacttgcccacgagactctcgatcgtatgccgccccgactgcaaggcccgcttgtaggcagcggcctcctcgcgcggccgtacgtcctcgcgttgcaggttctccgtgatggcggcatcctcggcctcggcgtccgacaactcccggataagggccgggatgaatttcaggcccgccattgcagccgcccaatagcggcgctcgccgtagacgatctcgaagccctcgtccctcggacgcacgcagataggttgaagaacgcccgactgtttgatgctctcggcaagttccagcagcgtatcctcgcggaaattcttgcggggattgtaggtcgaattgacgatcttgttcagatccagcagccggacatccgtctcgggatgggctgccggttgttcggcaggactggtttctgcgacaggattcacagctccgatatccgttgcctgcggttcggcgggtttcatgtcgggactcccggctgcaaccgggtcttgcgcttgcgccgcaacggcctcggaaacggccggcgtccgaactgcggtcttgccgcccttcttcgatttcgaatttgcttttgcagtctgcataacatgtaacagtttttaccgtgtgtctcacgtgtttatccgctcgcacgaattttattgtttttatcgcgcaagcaatgaataatatgttatgaggctttatatcccgaacggatcggttgcctcgggaagattcataagcccgcggcgcaggtgcaggggcggaaaaataccgcagccccggcgaggatgatttttccgccccggagccggagagggaggcccggccgaccggcccgggattatctttcccggggcaaccgacaaggagataatttttatgatttctcggtatatattccgggatattaatagcgtatctgattgaataatggcttgattaatgtagagtttgcaatataaccgtaaaaaaattacggcataacaaaaataatatattatatttgcaaaaattcacctatcatgatgcttgcaaagttttcagtcaaaaactatcgcggtttttccgaacgtatagagtgggatttagccacacctaacaattatgaattcaacaccgaagttatcaaggacggcatcattaaaaatgggatcatctatggccctaatggttctggtaaaacaaactttgggttagcactctttgatattgtaaaccatcttggtcagaaatggagaaaattggattactacgccaattttgtatatgtaggaaaactaaatgtcccggtggaatttgaatatgtattcaaggatgctgacagaataatcaattattgctactcaaaaaataatatcgggcagcttttgacggaaaaactatccgtcgataatatattagtattcgaacgaaccgctcgtacattcaacatagataccaatgaatttccgatggagaatacgaccaaacgaaatttgaaagataatgccaacaacgtatccattatcaactttttactcacatcatatccgttggcaaaaaatcattacctgctaacagtgttgcaattcgttgattcaatgctatggttccggtgtctcgacacacgagaatttatcggattggatcttgcaccaaccaatcttgatgaatatatcatccagaataatttagtaaaagatttcagcgagtttttacaccaagtcagtgaccaaaagtatcaattcgcgaatcctcgacctaatgacaaactgctcgtttgtaaaataggcggcagagatgttatctttgataagattatctcaacaggcacgaatgcactgatgcttctgtatttctggatacaaaaaatgagaagcgcatcatttgttttcatagacgagttcgatgccttttaccattttaaattggcattcgaggtgtgcaagaggttgtttgctctggactgtcaggttttcacctcttcgcataatacttatctgatgacgaacgacctgctacggccggattgcaacttcatcgtaaacaacaataaaatcaagcctcttagcgcatgtactcaaaaggaacttcggtttgggcataatatcgaaaagttattcagaggtaatgcctttcaattatgattttgtttgtttttgaaggagcccgaagagagccgatgctttttgagagcataaaatatctgttttttgaaaaggaaacggatacgatagtttattcttttggaaacaacatttataatctttacaagcagattatggagttgggaactggagacattgtatccttattacgggaaatacaccgaggcaatgaagaaaacccgttcaaagatattgccagttcctcggatttcgccgaaatttacctatttttcgactatgaccttcaacataaattcctttctctggaagagattaatagtagattgaaggatatgttggaattattcgacgacgagacttcaaacggaaaactttacataaactatccgatgatcgaatcgatccgatatacgaaagaacttcctgatagaaactattatcagtatacagtcaaatgtgccgaatgtcatgattttaagcgattatcttgtgaatttagccattatgacaatttggattatatcttgatagatcgccatcggacgcctaaaatatgtttgaatgcaaaagattgctgggagcatctgaaaaccatgaatgtatcgaaggctaattatatatgtacaggagaaaatgtcatgcctgctgtaaaaaacgccatagctcaagataaaatttttgaagcacaacttcaaaattatatcaataagccagtgccaagcgttgcaatattaaatgcctttcctttatttatatatgattatttcaaggtataatcgagggtggggcggaagccaaagaaatgcaaaacatttccgataagacataatacgttcagatttacgaccattttataaagaaaggcgatagattatattatcgtctttctttatttctacgcccgttccactacgacgatctccgcacggcaattcgtacgtgcgaacggctcctgcatgggtgtccggtggcggacgataaagtgccgcatcgtctcctgcacggatttcggacacggcttgtcgataaagccgtacggcagaagcagcacggcccgatcgcccgagtgttgcgtgcaggagagccattgcaggaaggagacacactccgcaatctcgaacggcggatttgcgatgacgttctcgcagcggaaatcgatctctcgaaactgcatccgcagtgcggcagcttcggaataaaaacgtgcataaagatcaaccagttccgcatcggtatcaaagccgaggatcgccgacgggtgcacgccttcgaggatcagggcgcgtgtaagctgccccgtgccgcagcaggcgtccacgacacggctatcattgtcgaaataacgcacggccagcgccgccatctggcgggccgtacggtcgggtgtcaggtattgcgaggcatagacacccttgcggcgctgtcgttcgcacatcgcgtcatagggccagttatcgccgccgtagaggaacggcagttcattgtgttgctgccagtagtcgagcacctccggcagcgtgtccggccagtaaaagctacgccgcaggtagtagttcagaagtgccgggcgttttgtgattctttcaaagattttcatacgatcaggtttttactctttattctttcgctgcgccgcaatccaatcgggatcgccgcggcggtaagcgaggagctgggcggcgtaatcgtgggcttcacgggcattctgcgcccggtagtggaacatccatttttgcccgcatcggggacattcccagacgaccatcgtgccggcaggggtttcggcaagacccagcatacagggcactacgttgtagtgcggcggttcgaaaccacattcataacaggtgtagataccgcggttatagcgtccctgcggcggaacgcgcagggacaaaggaatatcgatcatataagtatatggtttaggtgttcgtatcttcgggcgaagccgcgactccgtcgtcttggcaatagtcgaatttcatcagcttggcgacacgggcgtactcctcgtcgtagtacgtgtcgtattctttctgaaactcctccttgtaatgggttccgccgtcgggatcgtcggggtcatcggcttcgacgaatgtttcgaaaggtgcatcgtgtgcgctcagcagccgtccgacggccagatcgcaggcaatttccataatcgacgtgttgatcgcctccttatggctacggtaatattcgtgtaaattcatgtttttgtattttagcgtgtttttagttcgaagagctgtattcctgccgagattccgcagggatatttcggaggtgttcgcagatatttatgtccgcataaccaccgtccggtagaattattccgggccacagcctgtttcatgcgtcatattctttccagagtcggatttgttcttcctcggattgtccgttccaccacgcctcgcaggcgtcggcaagcacttggcacttcgcttcggaaggttgtccgtgatacaggctccgtctgccgccgagtaaatcataaccgtaggatctccgttattgttttctatatccagcggatattccgttccgggaatctgataggctgcatcttcttggtaggtcggatcgttcgacagttcgtcgagttggccgtcagcacacagctccttgaccttccgggctgccgtttcgagactcgcggtttcaatactgaaataccggcaatctatgacagttattttttgattccgataaaattcatagcgtttcattacacgattatttgaggttaatacttcgatacttccagtccctttttcgtcatgctcatcgaaaagcccgcctcgtggagctgtttcagtaccgaagcattgctttcgtggataagaatcggatagacgtgggagtagttgtcggcaatcggtgtgttgaacgacaccgtgatccggttgttccgtggaaggtataacagaccttcagtttgaattttcgtcgcatagtgtttaagagttagcgttgtcgttttcagaccattcgtcgactgtcgtcgcatcgtagatgccgtaccggcgtatttcggcgtatgcctgtccttcccggagcaggggctgccgggagacgaacgttccggagaagtttgccaaagccagcggaacgagccactggaaatcgctgccccgaccgcccatgacctcgcacgaatgaaaatcggcgggaagggtttcggaatcgaggcgacacatagtgaaaagagcagagatgccgttgatctcggcctcgcggaaatccctgatatccgcgaaaggaatggatgattcgtatgccatgatatggaaatgacgccgcccgctcgttgcggagcaggcggcaggttattaaagaaagattcggtgccacgctccgcgcagatagacgttaccttccacatagagcgtatataagtccgcagagacaatccgcaggaacagagtcctgtcgccgcgcagtttcccgatctgacgccggagcgcttcggcgggaaagggtttgcgcgagatgaaccgtccgcggatctctgcctccgaggggatgtattcgtacaagcggtagttgagcgccagccagcgaaggattttacggcgggttttcgcatcgtccgtccgcagtgtgaaacggttgaaacaaagattgttcatcgtaaatcggagttagttcagtgacaaggcctgacagaaatagtccgtataatcgaagtccagtcccagcccagaacaggccgtttcaagatcgccgtagcacagagccccggcatcccgcagttcccgcagattgcgaagttccgcagccagatattcttcggcacgacgttcgccgcagcggcacgcagtgcagatattttcgataataatgtttcgttccatagtcgtttaaggtttaggtgtgaatttattgtcggagagtgcaaggaaatcgtcgagcgtgcggcaccgatagtccaaagagatcttttcgctgtaatccgtctgccggatatcgaaagtataggtcaggccgttacgaatgatctggccgtgacttttgtcatgaacccaaaccacatcggacagagcctccaaccggttgcggtacccgattattttgcgttcgttctccgcattgatccgttcgaggttccggaaaccctgcgtgaggtattccacccaatcgtcaatcttctttttggtgaagaccccgatacgattcggttcggattgcttgtcgaaggccttgccgtaggagtagttgtccgcataccggaggaacgtccaatcgaatcggaagtcgtaataaggtttcggatagaagtattggcggacgagaaacaggatgccgtttctccagaagccggtgcaggcttcctcgaaatagttcttcaggctgtctgcggcgtgtgtaacacggtagaacaaggctgcctccggaacgaactcctgcaccgcttccaatacggccgatgcgcttcgaatagcccgctctatgttatcctcggcattggcgagcagcagctcgtcgaaggtcgactgatcgatccactttctcatcgctgagcaacctgcctgcggcaggattccgtttcccgcaggtaatcgttcaacgcaggcacaaggatcgtacactcggcatcgggctttccgagaaaacatttcacctttaccgatgcctccacgccgtcccgggcgtaggtcttgaagcggtagtcgtaacccgccaccgcaatctcgaatttttgatgtttcatcttcgaaatggattttgatttgacatacggccggcagatccccgctatgaaagtgagaagccggcttcggggcgggattatcagcgacggcacggacaaggcaaatttttgaggggcgatacgacccgaagggtggagatcgtgcgaaaaagccgaaaagggcgtaagcccctgacgctatcttgccccgcagacggcgttcacaaagggatttttaattattattcgtgctgtctcaaaacaaaaagagactgctgcggatgcagtcagtccctttcagcacgaacggatcagcgcacctcgaactgcggtatccgggagagggtcttccgcagcttccggcggtagaaaagttcagtaagcgcaagcaactcgtaggcatcgtacagcatctgtccgttgacggtacgggcgcggatcatccgctttttgcggcattgttcgagctggtgacggtccagacccagcacctcgcagaccttgcgggccgagaggaacatcgggcggtcgctgtggctcaacaggtgttcgaaaagcagtgtggattgtgtcagcatgaaatgcgtgcggagcagtttctccaaagctccggactccaccaaataatacttgtcaggcatagggttatgaattaaaggttcctgatccggtttttaagttcttttcgctgccggcactccgtgtcgatccgctcgacaaaacggtttatctcggcagcggagaacataagacggcgcccgaagtggaagccggtgagctgaccgctgacgcagtaacggcgcaactgacggtcgctgatcttcagcaggtcgcagacctcgctcacttcaaggaccggggtgccgcaaagcatattccggtgccgtttcatataggcgatatcctcgcggatctcgcggacgatttccaaaatctcatcggatcgttccatagtcggattgcagtgggtttgcgctgcaaagatgcgacgtccgaatgatgaattcacataaggcagataaatacctaatatgttattttattgccgggatttatgcctctgcggagaatttcgcggccagtttgtcccgcagcatcgtaacctcacggtcgatcatcggcggggtgactttcgcatagatttgagtggtggtgatatttttatgtcccagcatcttcgaaagcgtctccagactcacgccgttcgacaggcagatcgtcgtggcgtacgtatgccgggcaaggtggaacgagagttgtttgtcaatgccgcactcccgggcgatgtttttcaggctgtcgtcgatcgaatcgagtgtagacatggcaaaaacacgtccgtcgccggtcagaccccggtacttgttcaggatgaacaacgcatacggcagaagtttgacaacgtatctggtttcggtcttctggcggttgccgctgatccaccactcgccctgcgcatcctgctcgatccggtcataggtcagcgaggccatatccgcatagcagatgcccgtaaagcaggagaacaggaacatatcgcggttatagtcctgacgcttataccgcagctcggtagtcatcatacgccggagttcatcttccgttaaaaaactacgttccggattcggagccgtatattgatagagggaaaaggggttgcgaggcatccagccgttgttgaacgcgattttgacaacgtatttcaggcatttgagataaccgctgacggtcgtaggcttgagccccagatcggatttaaggtagacgtggtattgctcgatgaacgactgctccaattctgccaagggcatatcgctcacgttatactccttacgcatgaaagtccgcagatggtcgatggatttatagtagcggttccatgtaccgtggcagcggtcgatgccgacacgtttcttgaggtcgccggtgaatttctcgaacgcttcgagaagcagccggtatttctcgccgaagccgagataggcattcttgaccttttcggccgtaacgtatgactcccggtcgcagatatcctgatagtgcttgccgatctgggtgcggatgttgtccagatgacggttgatgcgatccgcttcgagactgcggcctttggcgcggccgccgctgacctcccaaagcatctccggaacggagagcttcgcgctgaactgcgcgatgctgccgttgaccgtgatgcgacccatgacagggacgactttctgatctttgtctttgttccttttaaggtagaacagaaccttgaacgtgctgcgcataaactctgctttttagggttgcaaaaataatttcagcagagtcgtatgtcaagatgaataacgatgcaagaaactgaaaatcacgtttctatgaataatagagcgaaagaaacgaggtaacgatttggaaaccgaaacctcgtttaacattaccttattctactttttctctaaaacaaaggcactgaagaaaagtgtataattatttgattatcttttgctttacacttttttatacctctgttttttatccccggaaattctctggaatatcaaggattttccatcagtcggggtgactggattcgaaccagcgaccacacgccccccagacaagcattcgctatcgctacgaccgactcaacatatatcgacgggtttgtctcgactaaaaaataattctcggttcatttttttacctctttatttgctttttaatacagttcgttatatttgcacagagacgtttaatattagaccgttataacatacataaccatcaaaatcgacgaggtgacgcctgagattcagaagacattggattatctgacgtctttgtccggcgtgacgatttcctcgactccgggtacttcgagaaactgtcaaattgttagcgattaatcatttgacagctttattttatctgccatgtccgcaatttgtccgcgttttccgcaatactgtttttatattccgaaagcggtattgaggcgaattcgagaactacacaagaaaccctttgacagaggctaaaagtacaagaaagaacggtagcatctttcatgctaccgcttgatttgttctcagataattaaatctgttattttatcaggcaatgataaatcactatgttcatccacatattgccttattttattgttatatttttgttttatctgcatgctttttggcatattcgtagtcttcgtccgtaaatacgaagatatattccacactcctttttccctgcatttttttttcgaaagctgttgcggaacagaaattatggtaggtatcgccatcctccgagtggtgagttattgtggttccatcgtcgaatttaatctgtgcatcaactggattcggtaaaccatatccaccatcgatactgtgctttgttgtgaaagttgtgccgctttttagcgcaaccgagccggttaaaaattcgctactcggtttctctacaattatttcgatatcgtgctggctggcattctcaatgcggatctccgtattatatagataatctgtgtcacaactgaaaagcatagagaagaagccaagcagtagcaaggtaaaaatcgttctgttagttttcatagacagcgaataattggttgattgtttccggggttaagttatacaattgcgcagcatacttatttttcgctgcataatccagcagcagtcgcttgacatcagcaaatgtcttcgatcggaaaacgatatcctctccatttggcactttccataagtactctgttattggtataataagcagcatttaaggctgccgccttttatccggcagcagcctcgcaatgataaatcactttatcaggtcggcaagattgtcgtcggtgaaaacgtaagtaaaccggaaatagtttgtagccaatttctctacctgataattgctcctattccgaatcgccttattcggttctaatagaatcgttttggaatcatctattgtcatacgacactcgatctgcggaagatattcgaaaggaaacccgatcgcatccggtgtaatgtctttcactccgtccgaccaaaaatcaatgcaataagtttgggtcggagccattataaacgtagtagtttcaagtatcgtccaggatataatagctccttttatttcgatcttgtgagaagattcatttcgatagacccattctccatgatgcacatattcggtgtgagaagtatcgcaacccgataacagccagcaaaacattacaatgctaccaagacgcaaagagttcatccacatattgctttgtattattgttatacttccgtttaatattatctcgccatttattccatgtatcgcagcctatgagagcgctctcgatttgtgacattgtataaccttcgactttgtcaccttgcgcataggtcttaccgttattttgccagtcatcaatttgtgaatctacaagatcaatgactacatttgtataattaggcgtcccttgcggtcgtcctctgtatttggaatagaccattcttgttaaataccattgtactcctgttgcccaactctcgaccatcttatcttcagcatcatgataatcccgataacgattcgtgccaggctccttaacaatcattctccagtgagcagcatgtgctaactcatgtattgtagttgcataaatagcatccgttgtgttttgtggattatataatttgattgcactacccaaacctaaaaatcgtctggcggacttaaaattaccattgctgctgttattttgttgattgatggcttttaatctcattttagttcgccagaaactattttgaggcggtctgcgtaaaccgccaatatctttgtaataataatggtaggctgcacgaaaaactgttgctccaaaaaattctgattgtgattttgagcgtgcaaaatgataatcccaatttcccttccttttaggcccatcatagaaaacacgaactccgtcgccatttacttgaaattcataccgatcaagtccgaaagagtaatttgcaggccgcttaaaacgtccattacaactataatatccgtctgcattgacaaagcctgtatgggttgtaaaccatctacgggctttgacttttactccttcaacacctatcgttttcccaagtacttcatcataatagctaattctgcccgccggcctccatttactgcggcctcgtgtttgcggcccggattcatagtcttcgttatcgtttcctgtcaaacgcaaagattcttcgaccagcgcatcagccaatgcttcattccattttgtaccggaacgggtcataatcccgtcatcgtcttcatccttgtcttcatcgggaataaacaagtcggaaagaatttcataatcaacgcctatggtactcaccgcaggccattttgcgacttcgatggaggcgtattgataagtgggcaagctatccggaattgtaggatcatggtaatagctgccatattcctcgatttcataatccagtggaatatcataccagataatcgtagaatcctgcaggattaaatccaattcctcggatgagcggggatgaaacttcacgtaataatgcgtaggctgaatatccatgtctgtaattccggctctggttttcggtgagaggtttgccagagctttacgcatattccccactgaatagggattttcaagttgctgccccagtacagtcattccatcagtaataatttgagatgaagtcgggggtaactcagacggcaaactaacaaaatctttctggcagctaaacagaagcccacaacacaaaaaaagtaaggtctgtttcataaagcttaaatttagttaataatatattttatccacttattatggtaatttcctaagagcgaatatatataaaaaaacgacattcgagaatatattagagacatattgaacataaaaatatttgcattttacgcattttaattctaaaacatcttgaattctccaaatcagagtgtccgattttattacgcatcatcataaaattgacctaggaattttaattcatatcagatactaattaaatatgacattttgaacaacaacgcactctattgtaatacttcatactcattaaaagcatgaaatggagtcataaacacaaactcaagtaagaattacaatactacttttcaatataagccggtcggatttgaggttttatatgctcaaatctgactgacttatacatattttgctgattgaagaatatcgtcgtgacaagcagcgtcgaagggtgtttcaccatcgacggggccggggaacacaacgtcgaggacgaaaccgtaacgctcgcactcgtaaacgaagatctcttcaacttcgaggtcgcaggatggtacgacacctccgggcagcttttgtccggcgaggcgacctatgcgctcacactcgcgcgcgactgcatcaccggcatcgaggtcaggctcaagccccggactgtgaccataacccggcagggaatcgcccggatagaatttcagtatctcgtcatggaaggcggacgtcccgtaccgaaggtagcctacgattaccgcacgcagtattcggccgactacaaggcttccgagccgataaagttctattatgaggaataccgactcgataggtcgaagatcccgcccgtcggacagcgatcgacagcaatgccgacgatcaccaaaggagcgagaaactcgacctacctctggcgctgcgacgaaaaattctccgtctcgatacaccccggcgacaatccgggtttcaaattccactataacgacagatacatagagtcgcaaacgacgaaatactacctgccttcagacataacaatgaccagataaccacagatcggcgtagttcaaaaaaaacagaacgacgcattcagtccatgacagggacgtgactatgggattgtgcggaacggatgcgcaatgcgggtgaaaggctcgccgccgattaatttataacagcaacactatggaacattttgcaaatatcgtcttaacctcgctcctgctaacagaatacaagcaatatttagacattgcacaaatgttatttatataacattttaaaggtagcgggctgttttttgcggctccacacaagaaataagttgaaggcttacctaaaactatttttacacgagaatactttcgcggcaagaatttcgttatatttgcaaaagacaatttaatctacaacaactatgacgcacattatgatcgaggatagtagccctgaagcgaaaaaactgctggcttacgttcgcacattgccgtatgtaacggtcatagatgcaaagaaaaagggattcgccgaagaggctgcggcttgtaatgccgttccggtaagtgttttcacgcaaaaattacacagccaaattgacgaatacttcgacaagaatgcgtaaggttgcaatttcggaaacggttttggataaagtttctgagctaagagcatttctcaccgacgagttaaaattgtcgcgcgaggcagcacatagccggactgcaaggatcgacgcttttctcgtgtctttagccggagcagccaattatcccttgtgccgcttcaaaaaatggcaccggctcggatatcggtgtgcagtattcgagaaagattgggttttcgcctacgaagtatttgacgaaggcatcatcattcaggacatgtgtcataccgccttcctgaaagaataaatcatcgacaaaacgcagaaccagctcaacaaaataaaacggtagtccccggaaacagtacgcttccggggactaccgttttatttaaatacttgtaaatattcctattggacttttgcacagcgaacctgacatgcccaactcctctttgtatcaatattccatatagtttcggttcgatctgtcaattcccatcgttcccccattccttgagtagctccgggatggcttacccaaagaggactatttgttgcatatcttcttatctcaccagaccaccagatagcacgagcaccttgagtataccaagccccaacagtatcaccttcgtatttcggacaatgccaaccatatatccaactgccaattaccaacaaatcgtgcaatgaattaggcttaataaaaccagtccaagttttattattcggaacccgataaccttcgggacaaggatcatatacgctcttttcgccagaccaaccataagttgtcaactctctaccgttgggatctccccatagagcatcatcattaccaaaccaatcgtccgcttcaataaattgtgtgggattttttatcgcatcttcgaaagtgacggcatctttctgcattcccctgaatgtactgaagaaaaggccagttttcccatcaccatacctgtagtcgttgtttggccacaaggggtctttacggccccattggtatatcgcgccaccatatcccacagatgccgcgttatcacttctagcacctaaattgcagtgcataatctggaatttttcacctgaagcatttgtatattcttcatccttgatagtactttgaggatgccagatatgccaactccaaagaatttcaccactaacatccacaatggccaccccaatatttcccccggtgttaggataccattcatcaacccttacggtcaatttattattatcgagtgtcaatacagggtcagattttgcatcagaataaagaagctttgccgatatgcctttatactcgtccccggcataaatccctgtataggcataatttaattctttagatgttctataaggggtgacgtcaaatgtcaccggagtatcaatatatacgatacaatttgctgtcccataatacaatccgtcatacaccctgacccgattgtcaatttcattttcccctttgataacaaggttcatcgtatgcttcgtatttctccgcacatcgaagttcgaagtactgttttcaccgagatagacagtatactccaataccttatccgcaccttcagccacaatacgcatatacgtcgcacacacgggagcattctctggcgatttgtctctgggatctgttatactctccacctcaccctgacaattctcaagcatataaaacacctcggaatatgtcttatcattgtcgatattgactacatcggcgtcgtagtattcccccttatcagtcgaagagggattcgctccgaacaacactgttgaacgcggcacattacagaattgaactgaacgcaacttaatattttccgacactgcggcatcgacggagatcgtgtaggcgatctttgccgcggcccgagtcacctccagcgttggaagcgtcatggccccaagaatactgacattcatacttgccgtcatgggaatatcatcgaccatgccgtcaacagaatatttatatcgtataagttctgattctgtcattcctcccatatccttgtgaacattcgtcacaacgcaaagggtataggttccggggaggatttcgaatacgaacgacggggcgtattccggatagtaaaagtggtaattgatattattgccgaaaaaatagatattaatgtcattaatcgcatcttcatcgatggcacgggtatccatttgttcagatttaagtttcagctctacctgaacaggagtgtcttccgttgcaggcggtgtgggggaagccggaagatctccctcggtacatgatgcaagcatcacggctgcacttacagaggccgtaagcatcagtttcagcatctttttcataatagtggaaatgagtttttacgcaagtttttatttggttaacaacaattaatcttctttattgccggttacaaagccaatcggctgacgcgacttcttggcttccggtagtttcacagacaaggccccaatggcctcataaatcgcatcgatgtcttttcgcatgtcctcactcagatcattcacagcctccagattctcccggcagtcatgctccaccagctgcaaccggctacgcaactccagcaactcggccgaaacttgggtagattgcaaaatatagttgcgcattgctacaaaagctcgcataatggtaatgctcgtttggattgcaactgaactccttaatacggccgataacatggatacaccttgctctgtaaacgcaaaaggcatataccgaataccacccttgtttgaggtcacagattgtgacctcaaactgatttttaatacgttatactcggattctgtaatttcaaacataaaatccgaagggaatctttcgctgttgcggcgtacagcttgtttcaatacttttgtcggaacttggtaaagttccgctaagtcgaaatccagcattaccctctggccgcgaatctcgtaaattttattctgtatgatctgaatatccattttcattaatatttcaccaatttccctgattggtatattttaccaatatttttgcatctgaagctatcagaatatcacttgaattttttatcatattattatactcgtgggctttattactatcaatagtaaccttgataatgccttttctccgcctttcttccttttttaagagtatagcgtattttgctgtaataggataatataaattgtaagccccttgtttatttggtctggcatctactatgggttgtattcctgttatgaatggaacatcagaatcatttatcaataatgtaatgtggtaatcgtctggcttggttaccatatcatcgactatctgcatcgacataatcatcatcaaaggataaatcacattttcagacaagccgacgtttttaggagaggttagttggttggcttttttcaatatacccggagttcgaaaatattgagttccaaaaaacaacaaaaaattgacttttgatcgttctgcctcccaccaatcaatttccccagaacctatttttcgtaaaatatccgcagcagtagcttctatctctgcatacaattcttctattaaattgttcgcaagcgtatctactattttatacggggtctcggcatctccagatgtttgcggccatgtatagtctgatactatttgcatcagactataatcgcgcaaacgaattgtacacttttcacaaacgaaacgtacaaaaaaactttttttcggagcatttaaaaagcgtttaagtggtttttaaacataacttaaacgcttgatttttatacgaaaaaaccctgcttttttctttgtatttcagaatattatttgtatatcgaaatatgttgaataaaagtgtcatgctgcgaccttgtcgagcagttcaacgatattctgttttatcttcattgtgtcgcgcttccattcggtcagagtaaaacctttctcgtattgcggatatggtttttcttttccacaataccggaaatgcttgcagagaggataaatatagcgatacgtctttacgaccagcacttcaaaatcacccagcagataggccatgtttgcacgtaaatatgccgatgccgatgttgtgttcgtcaatatctgctcatgcgtaatctctcccgtcctgcggttccgcaggaacttcgtgtaatgaaatccgaaatatcggaagtttgcggctttgtagatcgttccgcaccctaatcgaccatcggcgaacgattgaatcgccacgacatcggagtcaatcttgcgcagcagtttgatagatgcggcaataagcacgctttcggcgttgtgtccaagcgtgtcgtcaatccacattcggttaagttcgcacatccaagcccgcggattcggatgcgtgaatatcttcgctcgcgggtttttcatatacccgtaaacagcgacgcccaaacatttatccggttcttcggcccgaaatatcccgaagttatatttgccgaacccgccctcgttccacttatgggagtagtggttcttcacaatcaggtcctttgcttcggccttcggcactaatttgataatcaaacttcccaacgcggaagtatttttgaggacttgcagctcctcggtgttgctattcattcaacgattttatacctttgtgacctcaccacgtactaaaaacgccgtagcacatccgaaggctttagccctcggtggatgtgttacggcgcattcgttctgctgtacgtggtgagatactacaacagaccgggggctttttcatgcccctatttttcatgtttctatttccatcggcctattgcgaaccagtatatgggttctcctgccggatgtgctcctgcgctctcggcataactttttcgggctatgaaatatgatgcggttttgctgtttacggaagcggatgcaacgcccgtttttgcaccgaaagccaccgtcgtgattacacaataaggcactgcgtaaaaggttatcgggaaataaacggttatggttcccgttgagtcgcccccggtgttatacccccattgcagcagtatcccgtcgggtgctttgtaataaccattggttgaaaacgacttttccagcgaaacgttcgcaaggtccttcgcagccttattattccacattgatttttcggtgtcggacacgaataggtgcccgccgtcctgctctactcgttcggcgggaatattgccctcaaaatcccccccccggcatacgggagggcattccatgccttcacgccgtccccgatcttatgacggcttgtatcggactcgtagacgacttctccggcgaatagtacaggattcgtcgcagccagcgcggctgccgtgtacatcgggtgttgtatacgtcctttcattatcctatcagttttttcacctgcaatttgcattgctcggcgtattcaaaatatgcagcgaactcgtccggcttcgtgtcccgctggcgaagtatcgccagctcgtcggcgattgagtaccgctcccagatcagcgattgcacctgctgttcgtaagtcggtgccggagtatcatcgacgcactccgtcaggatggggaccccctgctcattctcggtaatcatcatgcccgcggcctgcccgtcgagtagttcatgccaccgttcctcggtgatctccacggccccgtcgatgggggcgtcataaaatccttgcttccagtatttcataatctttcgtgtttctatttccagcggccgattgccaaatattgaaaggtacaacccgaattaccatattcggcttggccattcgatagccgtttgatgtacctcggtcgcattgtaaaataggatgccgataccgggtcggccgcagctacttcaacggctgcgtctccgaaggcagtaggcgtggtaatgatagcgtagggtctcgcgtaaaacgatgccggaaaatacacggtaatagaggttgtctgattgcagcgggttccccatgcaaacatcatcccgtcaggagctttataatagccttctgcattgagtgattttaacagactgacattatccagattgctgttcgcctttgcgttccacgtcgtcttttcgctataactcgcaaactgatataacgtattggtggaaatatacgaagccggaatcgccgttaaacttataaagctgcaggcgtatgaaacaaccgcggcaatctcctcatctgtactttcgaatattccggccggaaactccgaatcatccaccgagccgaaagcgatggcattattttctgctacaaacccgaaaaccccaacggtcgtggtgccctctatgtaccacaccatacattgcagccctccgaagcgcaccatgcggaccttgccgatagccgttgccgcaatgaccttttgaagcacatcgttaatcggggcactcgttcctaagaaatctgccacagaatcagccccggcaacgggagtcattttcggcagatcaccgcccgcatcgtatgcgagatcattccatttacttatcccgtcgccgaccttgcgctttcgagtgtcggattcgtacacaacctcacctttgagcaggagaggatttgcggcggccaacgccgccgcggtgtacatcgggagttgcaatcttcctttcatcgtggttgtttacggttaggacattccgggaatggtgcattgaataacgagcgtgctggccttgaattcgtccagcgcggatttcgcggcggcggttccggcccccttcgcatcgtaaacagcgtcaaagtcggttttcagccgatttttcagcgcgtcgtatttgagctgaatgacattcgacgccgacacctcgatataagtgccgtcgcccttgtagacatccacgaggtcctgcacgggcagatattgcggggtgttgttgttttggaacaggaactcgacgtacttgtcgccgaccttcgccccggtatagggtgtgttcgccgtcgtaacggtcttgatcgacgaaccgcgcagcacttgatcgagcgggatgttaatcgacacgccgaccttgttcccgcccttcttcaaatgataggtcgatgcgaaaccgctctcggtggccaccttctcgatggtgtattcgaggttccacttggccttttccgcgtccgttgcgaaacggtgcgtggcatcctcggcaatcatcgaagctgcatgggttgccggatgctggtagttgttcgcacctgcggcgatgccatcgagctttgtcttgtcggccgccgacatcagaccgtcggccgcatgcgtggcgggcgttttctcggctttgttgttccagcccgcgatttgggtatccgtgacaaggcggtgtgtggcgtcggccgcgagctgcgcaagcgtggtcggctgtccccaactgagcgccgaccaagttttcgtgccgtcgccgaccttgaatttcacgggggacgtgccctccacaaatccgacttcacctttgagaagaacggggttcgccgtggtccattcggcctcggttccggttgtgtgtgcgatgcgagccgccagcagaacttgctccaacgccgccaatgcttgattgtcttccattgtattttgtatttatttgttgcctatcaaatccgccggggaccctccttgaagggttacgcgggtagttcgctgcacgcagtcgttctcaacgaccgaccgcaggttatccagttgttcgcggagttgatcgatggcctcgtccgactcctttttgtgttgcgcgaggtcgctcgcggtctgttcgacggtttctttgagtttctgaccatcggccgcggataatttgctgttgagttgatcggcaaggccatcgacgccattaatggcgatcttgtcctcgttcttgtgccaaaagctatcccaagcgtccgagaactgtgcggccgtgggatatttcccttttccgaaccatttgcggagttgtgcccgtgtgataattgccattgctccttgtgttatttcgttcgcatgatgtacgccagcgcataatacggcgggcggttctcgtggggcttgttcccgcccgtcatataagtgcggccgtcgccctcgttgagcgcattcgccgagccgccgcccgtgaaacgttttcccgcgtgttgcaggaacagcccgtgatcgtgcgcggggagttcctccacggtgagctggtgggttttcttgccgccgaccgcaccgagggttttgtagtcctcgtcgctgccgtaatggccgaccacaaagcgcccccggagatcaggtagacgaaagaagcccgccgaggtcgtgagctggcggccgttgcagtcgtagccgttgttgaacgccgcaccgatggcggcgaacagttccgggtactccgtctgccggagctgctgcccctcgcagagcagatacccgtcgggaaccccgcgcccggcccacatttcgaccatgcccagcggcgacggcttcatgtcggcgagagccttgcgcagggcggccagctccgcgtcgagcgcgggcagcgattgggcctcgcggaaatcttcccagcggtagttttcctcgccgacgccgggcgcgagcgaccgcctcacgtatgcctgcggatagtcgtagccctgcgcctgcacggagatcacctcctgcttgaggtacatgccgctgccgattgcgccgccttcccaatacagcacctccccttcggggtgctctcgcgtgtgcaggaatacgtaaccttcggcccggcgggctccgttatccattgggtcgcatccgagcagcacggccttgtttccggcgatgttgccgataatcgacacgacgtgcgcgttggtttgcaggtagtcgagcatttcgcagtcggcgggaaagtccttgttcggctgcaagaggtatcttccgtgtatctgtttcatttcaaatgaagtttatcgaaaatcgttttgatgccaatttgtaggtgttcacaacccccgtcacttgggcgaggtctactttgccgtacaacgcgacgggcaggttcacccagaagtcgtagccgttcacgccgccataacctcggcggttcagtatcacggcccggccggaaccgcgggccggaagccgaacgctttggtcggtgtcccggtggtgcaggatgatatatccgacgttctcggcattgtccgtgatcgtgatacggcggtcgatggggtcgaacatatcgttcagcacagcccgcagatgacacacctgaccgttttcctgaacccggtactcggcatcgtgtttccacaacacgaattgcgtgtgcagccattgcaggggcgacaccgcggcataggccagcgccgcgaatcccggcttgcgccaaaaggtcggcagcaggagcagagccagccgtttcacgttgatgtcgtacttacccattgtagaccttcatgttcagtttgatatcgcccatctcgaaatatcccgccgccggaacacaccgggcgtcaatcgcagtaaccacgctttcacctgcggcaacggtggttgcactccggagttcgggtattctcacgccgtcgatcttctgcaactgatccacgagtgccatgttggtatattcgccgttgaagggcaggttttcgatgtagttctgtatcgcctcgcggcaggtactctcgaccgccgaggcgagcagtatcgggtcgaaataaatgtccagctcgcagttgaagcggtcgggggcgatgtttaccagcgccgtccgcaccccggcgtccttgatctcggcgatgtaggctttgagttggctctcggtctccgcgtcgagcggacaacggcggccgcccttttcgcccgcaaccttaatcgtcaacagcgaggcgtcgtcgctctcgtcggcgacggcatgcttgacgacccgcgcggccgtgatctcctcgtcggtcatgtccgccgtgtcgtactcgtccgtgtcggggatcagcgtccggtccttcatataggccagcaccatatcccggtaccacttcgggcggtgcggtttcattttgtcgatactggcgttcacctcgctgcggaacgcttcgaatatgttctccaacgtccacgctgcgactgcaaagaggtagaacagcacgctctcgacggagagtttcccgaagaaggccgcgaagctgtccccggccgtaaagccgtatagtttcgccgccgtttcgttgcgcatgaagtccgcctcgatggactcctttatttccgctattgttctcatcgcaccataaaatcaacttcaattcccatgtaaccgatgccgccgaagggagcggcttcgatttcttcgtccgacaattccgtcgccgggcgtatctgccgggccgtatatctttccagcaccatcttgtcggccacgggtgcagtttcgagctgcgctcctgcttccagcggttccgagacactcacgtcgtttgccgccgcgaggtcgaaggccgcctcgacgccgccgctggtctgtaccgcgatgtccaagaggctctgcctatccgatggtgctattttcgccattgtactcaatcgttatctgtccgtccttcatttcgacgcgcgacacggacaatccgcacgcctgtaacatggtctttgcatccgctttccacatcggattcggggacccgccgagcatcttcaatatttcggccccgataagcgggtgctctttgaactccccgcgcacggcccgcagaacgcactcggccgtttgggccgtcgtgtcgccgacggccagccgcccggcggtcacctgcacatcgcccgtttcggggtctatcaatattccgcgcatcagtcctaatgtttcacgctgtcgttttccagctccgcagcgacggtttgtgtcagttgtcggctcgcccatgccgtggccgcagttttgagagccgcgccgccgtctgttcccgcgggaacccatgccgagaataccgctttcaactcgtttatgtcgttctctaaagcgttgagccttccggcggtctttcccgatataaccaaaccgcccagacgcccgccgttcagcgtaatgccttcgtccgtcaccgtcgccgatgtccggccgatgtcgagttgcaccttgtcgatctggtcgcacagcacgaccacggccacggccgggtcgatgaaggccaccacaacgtaactgcctgcggccgggaactgcacaaccccgaccgagccgtcttgcgacgcttgcaggttcacgcccacgagcggggcgctctcgtcgatgggcgtacagtccaccgtccgggcctgctcgtccacggcgtccaccgtgcatatcttacagtacaactcggcccccgacatggcgagaacccgtatagcctctttgagtgtcattccgctacccttaatccgattgttatctcctgccggaacccgcccgtcccgtattttatcacgttcttatccgtctgatatatgccccggcacacaccgtcgatcttgattccgatgttgtcgagcttgtcgatcagcacggccccgaaggtggtgaaggacccggccagcccgtcgcgtttcagtcgtttgagttcctgctcggcccatgccttcaactccttttcatccttattgtaggtgtgcagcgtgcggcgctggccgtcggcatccccgacatcgacgcgaatccgtttgttattcggccgcagggatattgcccgtatcttgatcttcacgtcggcggcgttctgcacgtcgagttgtgcatcgtcgatcaggttcaccccggttgcaaacacctgcttacacttcgtgtcccgctcgaacagcaccccgcaatacaacacgggttcaccgtcctcgatgcgaaagaacgaccggatgccgccctgatctttcaactgtccgagcaactcggtgacggtgttcgccgtgacgcggaactggccgatgtgctgttcgccgaacaccttatacttcacgccgagattctgatcgcgcaaaacctgctcgatggtggccgttttgtaggcgatcttcttcgcatcccgcgatttgaacagaaacatgtaatcctcgcaatgtatctcggtgggatttttcagccctatcgtcgtgataaaaccccggaaagcgaattgcagctcgccgtcataccccagccacaccgatacctcgtcgccccgcttgatgggcatggaattctcgcccagccagcggacttttttcggcagcgtcacgacgcacgtatcggtgagcgtgtcgatgtcgcgggtgatctccaccccggcgaccttgtcgaaccgccacgtcttcgcacttttgatctcaattttcgcagtcagccgaaacattgtttaaaggccctttaaacggtgtttaatagtcggtgtttttgattacgtagtcctcgtcggacaacgccttcacgtcgatagtctgacggttcgagtgcgtgtcttggttcagcgcgaatcgcgtcaccacgatacggctgatgtcgaacagctcgaagaacacactcgacacttcgatggccttgttctcgtcgaggaactctcggacttcacggatgccctcctccgggtattcgtccacgatcacgccgtcgcgcacggccacaatccccaccgttatactgatgtcatagtcgccgttggagatgtactccttgatcgtaccactcagcccgacgagcgtcgtgcggaccatgtgcttctcgcgtgagatattcacgactgcgtcgttcacaacgagcgtgcggccatcctcgcggcgcagcgtcagttcggtaagcacgtaacggctctcccaatagctgcggtcggtgatcggcacagacaggtcgtgccccgcgatgtctccgccgtggccttcccatgacggggctttggcgttttgctgcgagggttgaaagcggcagagggcaaagcgtgcctgctgtgcgacgcccgcggccacaaacccgaaacttatcactcctaaattccccatcacattgcaaggtttacgtcgttcaccgcgcttaaaacggcctcggcgaccaattccttcacccggctcatatcttcgcgcatattggtcgtgtttacctcgaagcggtcgatcagcctctcgatattcacggtgatgttacggaccttgtcggcctttgcgcttgtggtcccgatgctttgcagtcctccggccagcgggtcggggttgggggtcggggttgggttcgtagtttcgacacctgacgaggcttgctctttggctgcggcgtccgctttcgacttggcgatctccgcgtcgtaagccttcgtgaaggctccgccgacctcggccccgaagtccgagaacccgcccttcattttctgaatggcggcccggatgcccttgccgtcgaacttgaacgctgcgacgatcaggtcgcccaaaccgccgaacacggtttttgccatgttccaaatacccgtaaacacggctttgaacgaggcccaaagccctttcaacgtggcccggaactttacggacgtattccagaagtagacgcccacggcaaccagcgcagcgatggcggccgcaatccatccgatgatcgggatgttcataatagcgacacccacggcccggcacgcagtcacggccgccgtcttgaacgccgcgaagcccgccgaggcgatacccgcgaacgtgacggacgcggcaccgcccgtcaccagcgagagaacataggcccctatcgctttgatgccggaccatatcccgactgttgcaaagcgcagcgtggcgacggtcgcctgcatgatgttgcgcatgaatcccagcgcttgcaccttaccgatgctcaaatagccgttatacatttgcagcgacaagatggcccggcccatcacgccgatcaccccgtgccacatcccggcgaaattcaaagaacggatgaagacgatgccttttccgatgcccagcaacagcggtgtcatctgcgccagcggcacaagcgaacctaccacgacctcgacccaaatcccccagtcgcccgatgcgttgaacagcgagattttcagatcgtcgaacttggcccgcacgcgggagagtcgttcgttgtagcttcccatgatgatccccgcctgctcgacggccgtgttcgtgccggtgatcaccgactcgtaacgggtcacttcgtcgatgccctgcacgagggccattgccgcgttgctgttttcccggccgaacaacttcgtgaacagcgccgtgtcgttgagtacctttttcagcggggttagacggtccgtgagggacttcgatttgtcggtgagcgcgttgatgttcacgcccgccgccgtcagttcctccttcacgtctttgggcaggaagcgcccggtcgaaagtatcgccatgacgttacgcagcgcgacaccgccttcggctcctttcttacccgccttgtcgagaacctgaatagccgcgttcgtctcctcgaacgacacgcccgccgccttggccgccataccgcattgctccagcgcgaccttgatcgtcggcaactcggcggaccccgcctgtccggcggcggccatgacgttcatcatcttcgccatctgacggctcgcctccatcgggtcggccagcgacaccccatattggttcatggccgtcgtcagcacctcggccgcagccgtggcgttgccgcccatcgtcttgctcagaacggcgatattgtcgcccatcgctttgagcgccgaggggtacttcgccagttcgggcgagagctgcgacagcaggagtttgtacgactcgacggattgtgccgccgagccgccgaacgccttcgccgtatcgcgggcgtagccttcaatcgtccgcaggctttcgcccgtttcgcccgatatggccgagaggtcggccagcgaagcgttgagcgcagcacccggctgcagggtttcctgcatcgtgcggcccacgccctcgatgtactgcgtgaactgatttagtgcgagcagcttgccctcgaagctatcccacagcccgacggacttgtggattttgtcgttcaggtccttcacgccctgcgtgatgccctgcacgacaacatcgcagttgcccgtgatattgaaggaatagttaaatgcgtagctgctcattcactacttttttggttcttccgcaaaaagtttctctaacagttttccgagcgcgaggaggcgcgttcgttccagccatacagcctgttcatacagtcccgcccactcgtcataggtcagcgtgccggggtcgatgtgaaagttcgcccggatcagggcgcaccccttcgtaatcgtctgctcgtcctcgatgtccgaaagggtgtgcgcccctacaagttttttatttccgtgtggcaggtggcgaacaaactgcccagcgcaccgagggccgacgttttgagaatcgcatcgctctgaacgagcgggctgccgccgagccagcagttcttaaacatcgtgtccgcacctttcagttcgtcctgcttgctcacggcgttaacggccgacattacatccatcgttggacgacggaaataagcgacatggtgttcctcggccatgtcgtcaaaaacatctaccgtaacgacgcggccgttggcctgtttccacgactggcgcatttcgtccgtgacaccgccgtcgaggacgggatacttggcacgtttggcagccagttccttggctttctgttcctgttcctgtttattttccatagttgattgatgattgggttataccttcggctggccccactcgatgtgcgaggggatcagcggaagctcgacctgctggttcagatcgccttccttccagtctaccttgttctcgtcgaactggcagtttcgaatcttgtcggtcgtgatgataccgctttcgggcaggtaggagaccgtaatgtcgaagggggcgatgtcctgcaggcggccgttcggggcctgccgctgcaaagccacgatctcgcttttgtagagggtaatcgacgccgacggtgtgatgcgtcccttcgaacgggacacgggatgccgtccggctccgtagttgttctgcacatcctgcttgtcaccgtatttgattgcggtgatcccgacgaacggcacgccgttcgctgcggcgacgatgtcgccccaagcaggttccactccgttaatcagcggcactccgtttctgatgttcattctgtgttggatttgaggttagacactctcggcaaagccgattttcaccttgaagcgacgcacgacaccgacgccgacaggccggattacgaactcgatttcggacgtagaaagcacgttctgatcggggtcgatttcgaccacgtagccgctcagctcgcccgccttctccatatcttcaagggccttctgggccgtggtctgcaagaactccacgctgtgagtctgcaactgccccgtagtcttgtcgatgtagacattgccgccgagcttcggcagcaggtaggtgcggatgccgcgcacggccttgtccatcgtgcggacgttctcgatgtaggcgtagtcgctcgtcggggcgtccatcgtgtgcgagtcgttcatgtacgacccggacagtccggagtaggtcacgaagaacaggtaacgcgatttgtcgagcgcctcgacgacggcgcggtccagcgttttcagcagcgtgccgtcaccgaaggccgggacatcgacgcccgtcgggaatttctcgatccacgcgatagactcgtgaacagcggccagcgacacgatgccgaggaccacgccaagacccgaaacggaggctttctccgtgttttctgcatcgacatataacgctgcgcccgttgaacttccggcttgcccgatcaccgtccatacgcgctccttgtcacccgcgagattgctcggcagcgatgccacggccgagaccttcggagcgtagatgatgcccagcggcatatcctgctcttcgagcgtcgcagcgaccccttgcagggccgtgaggttgtcggccgcgaggggtgtgcgtccgtcccatacgccgagctgccggagtcggccgtcggcgaagttctgcatcttcttgacctcggcataggtgttggctccttcggggttggtgaaaatgccgacgtacaggctgatgcccggattgacgcggaagatttcggaaagctggtagtgcaggacccggatgtcccagttgtcagcgtccgccgtgatacccaacgcctcggccgtttcgatggtcgaaacggctttgatgcgctcgctctcggagaagcccgaaggcagcgcggccgaatagatcaccagtccggagatatgatcttctcctgccagtttcttggggatgttcccgttggtgcggatgaatttcaaagactgcattaggctttgtagttttcgttggtaactgcgacgacgagcttgtcgtcgagggtgtggccgtggttgtcggcgtcgcacttcacgaagaagggcgtgccgtccgaggtcacatagaccgtctgtttgtcggggtggctccggaacacctgctttgccacggcctgcgctgcggtgtcgcggatggtcttctttgcggcagacgccttgcccgaactgcgtgcggcactctttgccggagcttctttctcggaccgggccgacggttcggccggaacctgctcggaggcgggggctgtgtcgggctgctcagtcgaagcggaagccagttctggagcctcgctgccgtccggttccgggtcggcctgcggctgatcgggtacgatgtccgcaggctgttcggccgggacctgttcggggttctgtttcgctgcggccttgcgggacgcggctttcgtattcttgtttgccattgtggatgggttacttgttcttgaaaaagcggtaaaaaatgtatatcagcgacagcaggcccacgaaacaaagggccttttgccaccatgtaagaccgcggcggctcttggtcgtggtcgcggtgtcggtcgccgtctgctggtccgactccctgcggagttgtagctggtcctgttcctgcgtcatgctcccggtcgccgtgcgggtgtcgcgtgcctgcgtctgccgcaggcggctcgaatcctgcaccgagtcggagcggaggcgtcgctgggtcgtttcccgcagcaggggcggcttgccggtcagcgtgtcggccgggcggcttgtgtcgtactcccgtgtgacggtttcgacatcctcgaccgtggtccggttgcgggtccgctcgatggcgagctgctcgcgcagggcctcgcacaactcccgaaagaagatgctgtctcgcgtgatctcccgatcggcggcgaactgctcatgcgtgttatttgtccgctgttcctgcgtcttggcaagccgtttctgcggactgcaattcgagaataacaggacactcagcagcgtgagggcaggtagataccttgccgatagccttttccagtcgtgaaacattcgtgttgagtcgttttacttggccttcgagcggtcgcacgatattctgcatgatgatctcgttccccagccgggcgttttccagttccttgcggttggcgtcggccttcgccgaggcaacctccgcccgcagcttcgcaatttcggtgtcgtacttctgccgggtaagccgggacgagagccacgcagccacaggggtcgcggctatgccgataagggcgaggattatttctgcgggcattcgattccaatagatttaagccatgccgcaacgtcgaacgacgggcaggctttacggacgcccggcaggtcgcggtggccgacgattttcacattcgggtgtttctcgtggaagtagataacgtagcattcgagcgccttcctctgcgcgtgtgttcgggtgtccttcggcgtcttgccgtcggcggcacagccgccagcgtaaacaatatgccgcgccacaccgttgtaaccagccgcgccgtttgttatttcccacgggtccacgaatgcgtcctcgttgttcccgaccaaccgctccaccgtgccgtccaagtggaaaaggtctgtatatccgacctgacgccagccccggccgccctctgacacgggggccgtgtgccaccgccgaatatcggcggcggacacttcccggccttcgggggttgcggtacaatgaatgaccagatattgcagagcctttttcattgtattatgccgcaggggtttccgatgctgcttttgcgctcacgatggcgccgaagccctcgttacgcagcggcagacagatcgtgtacgtgcgcatcgagaagatgttctgctggttctccgggtcgagatcggcggggcgcaggtaggacttcgtcgagccgtcggcacgcatcgcccgcttggtcgtgaaagctaccgaacactgacggtcgttgtcgccgataaccgcgccgaacgccttctttttgagcgtcgtggtgtcgtagtagggacactcgtcgtactcgtacacatcgaagccgtacatcttggcgatcttgcccgtggtgtagtcgtacatctgtttctcgaagcgctggtccgtctccagcaggtcggcgacatggtcggcacacagtacgaggatgcggccttctttggggattcgcagtttgtcgaacttgtttttcagcgacacgatgtccgcgcggatcagttttttacgaccgtcgggtgttacgtcacccgtggttgtgataaccggggtcttggccgtgttctccgcgggagccagcgaatggatggcccgcgagtacttcttctcgaagaacatgtccttgtgtttctcgatcacgagggccatcttgtcgtaaccgatggcatgcagttcatcgtcggtaataggagtcgggcgcgactggaatttatcgagctgcacggacttgtcaccgtcggggagttcctgtacggtcagcgggtaggtcgtattgtttaccaaaatttcagggtccgcaccgacatcgacgaagtggatggcgtcggctttcacatacgagtcgtaggcgcgaatggcattgtaccagccgatgctttccgcggctgtccggaaggctttgataagttcgcccgtccatgcttcgggatagatacccgcggccagcacgcccgaaggcatgaagccgccgcacagcgcagaggccgccgacatgccgttcacggccgcgatgcccgcaatggggttaaagtcgaatacgcaggcaatggtggctccgactgcggaattgacaccgagcgctgcgagcatgcccaaaagggcaagaaggaattttctcattcagaaaaagggaatgtttagaggtgaatctacttgagggagttggtgaagttgggcgcgaagccgtagtgagccttgtacagccggatgtactccgagcggttctgctcgcgcagctcgatcttctgctcgtcggacatcttgtcccacgagagcgtcatgttgccgccctgcggtttgccgccgtcgatgaagtccatcggcttggatgcgggcgtcatcatcgccagcgtgtcgcgcagcgtgtcgatgccggccttcttgcccagttcgatcatcttcggcatctgcgcctcggtgatctgacgattgtccttcgccgccgtcacggcatcggtgatgcgggccagcgtgagtgtctcgttctcggttttcagcgcccggattgcggttgctgcgtctgcttcggtcgccgtagtcggaaggccgagcaacatcaaaatttcattcatctgaaaaatcttgttttggggtttgtcgtcgttgtcgggtttgagaagcggcagcaggtcgttgtcttcgccctgcgcgagtgtgagcagcttgccgccgctgtacaggcgaacctgtaaggcgtcgtcgttcgcgcccacgtccacgattgacacctcgacgagtttcgagcgcgtgaccgtcggccgggtctgtccctgcaccacattctgcgggtcgtccgaccattcgaggatttcgatacctgcggacagcatgcgcagcgtgccgcgctcccatttggctgcgattaccttctcctcgtcggtgtcgccgtcgatctgcggcgtgccgaacagtcggtcgttctcgacgcgcaggtcgttcatcgtgccgatgggaatacctcgcttgtgcatatacagcacgatggggttcttctcatactgcgaaatgtcgagaccttcggtcaggactcgcgtgccgtaggcgttcacgctgttgctggtaatgactgcttctcttgccattcagttttttttcggcctcggacaccgccgacagaacgtcggcgggtcggtcggcctcggatgcaaaaaaggtttgtagcgggagcgggactcgaacccgcggccttgagggaatgaacctcacgagctgccaactgctccaccccgcgattcggatgcaaagatgcagggctaaatccggcgtaacaatcggagtgtaaaaaccttacacttcattttacatacttctgtttatggcgcaactttgccccgtcgaacgccctcgcagggcatcattttttttcgtatgaatgggtaggaaaatcgccggagaattgaaggagttcgccgaacttctgtatatgcagggcacgccgcagaacatcatcgccgagaagatcggcgtgtcgaagaacaccatcggcgcgtgggtcgcggctggatgctgggccgaaaaaaaagtagcgcaatcgctgacacggaaacaagtcgtgaacaacgtactgcgctctataaacaaagtcgccgagaacctcggcaattcttccgaccccacggcggtcgggagtagcagcgaccaactggcgaagatggccgccaccataaaaaccctcgacaaagacgtgtccgtcgtcgattacatggagtgcttcatgtccttcgggcgctggctcgaacaacgcgcggagttcgaccccgatgtcacggccgagttccgcaaagtcgtaaacgatctgcaaaacaaattcgtcgtcgagcagctcagtataggtaaagtacaataacgatgggcaacaatgttgtaaaaacctatgccgagtggcggcaatggtgtattttcgtaaaagagcggacgaccgttcgcccggagtcgccagccgagaagcaggcccgcatcaggcgtgcccggaccgactacaacttcttcgtaaaccattacttcccgcactacaccgacgacccggcgacgggaaaacataccgagtgcgccccgtttcacatcgaggccgcgaaccgcgtccgcaaggacccgaactataaaggagtcgaaaagtgggcacgcggtcacgccaagagtacgcacttcgacatcttcatgcccctgtggctgaaaatacaggagccgcgcgagatcaacgtaatggtcctcgttggcaagtccgaggagaacgccaaaacgctgctcggagacctgcaggcggagctgcaatacaaccagcaatatatcgccgacttcggcgtgcagtataacgcaggcgattggcaggacggcaagtttgtgacggccgacggctgcgccttcttcgcccgcggccgcgggcagtccccgcgcggcctgcgctaccgaagccgccgccccgactatatcgtcatcgacgacctcgacgacgacgaactgtgcgggaacgaggcacgtgtgaagcggctcgtgaattgggtgaaggaagccctgttcggaacgctcgacggcggccgcggacgcttcatcatggtcggcaaccttatcagcaagaactctgtgctggcagcgatggcgaaggccaaaggtatacacgtctcgcaggtgaatatcctcgacaagaagggtaacgtgtcatgggccgcgaagtggtcgcgcgaggaggtgcagaagatggccgatttcatgggctaccgctccttccaaaaggagtacatgaacaacccgatcaccgagggcgtggtgttccggcaggagtgggtccggtggaagaacccgctgccgcttgacaagtacgactatctcgtggcctattgcgacccgtcgttcaaaagttcttccaagaacgactacaaggccatcaaactgtggggcaaggccggaaccgagctgcattgcctcgcggcgttcgtccggcaatgttccgtctccgaaatggtgcgctggtggtacgacctgcacgaacggatgcccgaaaaagccgtagccgaatactacatcgaagccaactttttgcaggacatcatcctcgacgagttcacccgcgagggaaacatccgcggctatcagttgcccatccgggccgaccgccgcaagaaacccgacaagttccagcgcatcgaggcgatctcgcccctgtgggagcgcggcttcgtgtactacaacgccaagcaacggaacgaccccgatatgctggccggactcgatcagaccttatgcttcgagaaaggcatgtcgggccatgacgacgcccccgacgccgacgaaggggccatttacaaactgcaacagcacacccgacaacaggcgttcacgccgtcggtcgggtacaggcatatatcagctaaaaatttatggtaaaattattcagggcgctggtattccagcaccgactcaaaaaacagatccgcatcgccgacgaacggaaacgccggaccggaaagaaacagtttgtaatcaccctcggcggccgtccgctgtgtgtgtccaaaaagcgcatccgcacgctgatctccgagcaggtctaccgccgtggcgtgaaggtcgccgacatcgcggccattgccatctataaaaccaagtagcgaatgtttctcgaagatcgggattacaaggtcgtctgcaacgacgacaccctcgacatcatcacgcagagcgacgagcagacccgccgcgacgccgaacggagcgcgcaggaagaagtggaaggctatctgcgcgcccgttacgacacggcgaaggcttttgcacaaacgggcgacaagcgaaatgcgatgctcgtgcgcgtcacggtgagtatcgccctgttctacctcggacagtcgctaccgcagttcatgggcaacgagcaacgcgagaccatgtacaacaatgcgattgcatggctcaaagacgtacagagcggcaaggccatgccggacttgccgctgtatgaatccgaggacggcgaggacccgcagaacccggtgcgcttcggctccctgcccgcccgtaaatacacctattaaaaacctttcaaacaccgtttaaacaccgattgaatgggtaagaacaaggccgctcgaaaagcggctcccgatttcgaatcacgcacatacgagtccctgatggctgccgcccgcgcggccaaaaccatcgagcagaagcgaggcgtcctcatccagctcaacgaggttgcggcacgtctctcgcagaaagatattgcgacatggcggcaggcatggcagatggcgctcaatgtcgagaaccccaagcgcggccgactttacgactgctacaccgacgcgctgatcgacctgcacctcacgggctgcatcggccagcgggacggcaagaccctgcaaaagaaattcgtgctgaaaaccgaggacgggaaagaggacgatacggcaatgaagattttcgagcgccaatggttcgcggacttcgtgagctatgtgcttgagtcccgttattgggggcactcgctcattcagttgggcgacgttacgaccgtgaacggcgtgcgcaccttcaccgacgtatcgcttgtgccgcgcaagcacgttatacaggagtacggcgtcatcgtgaaggatgcgggcgacgatccccagcagggcgtgagctaccgcacgggtggacttgaaaagtggtgcgtcgaggtcggcaaaccccgtgatctcggcctgctgctcaaatgtgtgccgcaggcattctcgaagaagaacatgctggcctactgggatgtgttcggtgaaattttcggcatgcccatccgcatcgctaagaccgccgcgcagaccgggtccgagcgcagccgcatcgagtcgatgctggcgaacatgggcgcggctgcatggggactgttccccgacggaaccgacatcgacatcaaagagtcgagccggggcgatgccttcaatgtttacgacaagcgaatcgaccgggcgaactccgaaatgtcgaagggcgtactgaaccaaacgatgaccatcgacagcggctcgtcactctcgcagagcgaagtgcatctcgaagtgttcggcaacgtctgtgcagccgacgcaacgatggtgaagaatatcgtaaacgacaagctcattcccctgatgatcgaacacggatttccgttgcaggggttgattttcgactgggacgaggcggcctcgttcacgccgtccgagcgccgggaaatggagcgcgtcgttttgcagtattacgacgtggacccgcagtatttcatcgaccgctacaagatacccattaccgccaaacgtgcggacggttttttcgagtagggactgaccccgacggcggcaaggacagtcccgaaacgaaaaccgccacgcatgccgcgaaatcggcgcattatgctctcttgcgccaggcgatggcggacttgtacgctccgggagaactgacgctaaaagcggtccaaaagcccgatttcgatcatggccgattcgacacggcggcgcgttatgtttacaacagcggcggcttcaccccggagatgctcgaaagtaagcccgtgcgtgcgctgatcgacgagacgaaccgtgttctcggttcgacgatcaccgtgtcgcacgaaacaccgcccgaactgacggcggcgctgcggaacaacgtgttcatcttctccgggctgaaaacctatcactcgctttccgaggtcgggctgtcactcaccaacaaggatggcagcaccaaatcgtggcccgatttctacaacgaggtgaaggccatcgacggacagtataacggcaattacctttatgccgaatacaatcacgccgtccactccgcacagatggccgtgaaatggcacgagtgggaaaaggacggcgaccagtacgatctgcaataccgcacggctggcgacgaacgtgtccgcgaggcgcaccgccagctcgacggcgtgaccctgccgccgagcgacaagttttgggagcgctacctgccgcccaacggctggaactgccgttgtaatgtcgtgcaggtcttgcgcgacgactatccgcgctccgacagcgacaaggccacggccataggcgacgagtacacccggaccccgaaggcgcagatgttccggttcaacgcgggcaagaccctcgaaatattccccgcgaagcacccataccgaaaagccccggcgaaggtgaagaaggccgtcgagcagatggccgtcgagctgcggaccccgcaggaagtcgtcgatttcctgaacgcctccgaggtgcgccgggcatggttcgagcgcggattcaattcgttaatatcgacgaccgagcgcggcgtgaacggatacacggatatgcggggattgatcgccatgacgaaggcacggctcgacaacgtgctggccggactcaccaagctgcggcaggggaaggagatcaccttcgacgaggccgatgcgctggcgaccttttggcacgagatcacccacaaccggaacaagccgggaaacatgcgcatgacatctttacagactcaatatatggagttagcaaacgagttcgtagcgcgcaagaccctgccggagttctacgaaggagtaggcggaaagatgcaacatcccgaatttatggccgaccgccaatcgacgggatataataggtgggtgcgtaattattgtaaagtcattgaattgacgggggcggatgccgaggaggttctttctgctgtccgggaacatctgttcagccaaccatacgccgagcaggatgcgggattggtgaatgcgctgatgcaaagcggcgcactcaaagcagacgggacgaaactgaaaaggtcagaggtgaaacggattgtaaaaggctgcttgatgttcggcgaggatatgttacagaaatacgtggagtctattcgttgaagacagcccggtattcatcgccgaactcggcctcgatggcggccgcaagttgcctgtcctcgcaaaattcagcgaaagccatgaatgtaatggcccgattctgctcggacataggagcgttatccggacttaacgactgcataaagtcctccttgtcggccttgctatgcccgccgagaatctcgtcgaggacagcagggtcggtagtaaagtcgaggaacgacttgctccggagctgtaaattaccgtagtccattggataaatgatgcgttttcgcaaaagtaatggttttcaatgtgaaaacaaaataaatgccgagaaatattgatctcatgccccgcgtgttgagcgacatgcgggtaaagctggcggaaatgttcgatcagaacttccgcgagcagggattcttcggggccaaatggcggccgaagaaggtctactcgaagggcggaagtcccacgatcttgatcgtgaccggggcgatgcggcgcggcatccgggcgcaggtgcgcggccgcagcgtcgtgttcacctccgacaaaccctatactgccctgcataacgaaggcggcgtgttccggcagaacgtcccggcccattaccgcaacgtgcgcggacgtcgctccatcgtgcgggcgcactcccggatgatgcgcatgccgcaacgacagttcatcggcgaccacgcgaaggtgcagcgggccatcgccgacattatgacccgacacctcgaacgcatcagccgcgaccttaccaaaatcaccaagatatgagaaagaccctttatttggccctcgaagaaaggctaaaacagattgttttcgtggatggcgagccgaccttcgagccggatgccgataaacgcaaaggcaagcgccccgtgttccagcacttcgacatgtggaacgagaacatcctgcaacttgtcaaacagcgaccgttcgcaacacctgcgctgctggtcgaatacgaccccatccgctggaattacggcgggcataaagtgcgagaggccgatattctgatgcggttgcatgtcgttaccgcgacggcggccacggccgaggcgggcggacgttatcaggacaaagccctcgaacgcttcgacatcatcaacggcgtgacgcaggccctactctcgttcagtttcgacgacggcgtccggcaggccgggacgttccggcaggccgaatctgcaaccgaccacaaccacgaacaggtttgcgatgacatcgaaagctgggtcgccttctgccgggatgcgtcggggtgcaagattcccggaaccgcatcgtcggtgcagcgtttcgagctgcggccgggccagtaacgaacaacccccggccgtatggctgggggttgttgttaaaatagcgagagttgccgctggcgttcggcttcttcggcctcgttcaactctttgggcggggtggaaatgtaattgaggaacgtgcggtaacacatcgggtacaccgggtagacatgctcccgccatactgccttgtagcactttttcaatacaccagcttcgtaatgttcgttcacgatgtcgcaaaccagtttgatacgtcgcagcgtgttgatattcctttttacaccttttttgcccattctccgaaaatatcgctatctttgtcaaaacttccaccttttgactcgttggctgatatttcggtcggcgagtttttttattcctgctgtctgtcttggcccgtgaacggctcgatgcgaaccgttccttcgttcactttccagacacggccgaagcccttgcaaatcggacaacagacggacgagactcctgcggggccggatgcggtatataatacatcatcactaacttgcccccggccgccacagtttcggcacagttcgacggttgccttgcggtactctcgcgttttacacattcggcttaatcctccttctcttttttgggttcgacataaaatgtttcggcttggcctacgatgatgccacacttctccatcagcggagcgatctcctcgttttcacggtcagcaaggagtttgtctttcgcaatcgcttcttcggtgcggatgtacgacggcaggaactcccggaccagttccagcgcggccgcccatgtgaagccccggcggggtttgagttgcgggttgcctgtgcggaagccgataacgccgtgcgtcgtttccatgctccggcgcttcgagaacagcacctcgcgctgttccgtggcgaatacctgcatgacctcgaacgactcggctttctgctgctccagctccgcgagccgttcggcgttccgctcccgaatggcgacgaactccttgtccatttccgcgttgatactctgcacatcggcgtccgctgtcgcgtaacggccgaaagcttcctccatctgttcgcgcgtgatgcccgacacgatgatcttctttgctctttttgccataaaattcgttgttttaattgttcgattgccttttttgtccggggccgatttgaccgttggttatttcgcttccaaaattggaaggttcgcctccgtgggaatgtatataaccttgctggggacgttgttctgctggcgtacccacaggtattgaatgtaggtcggtgtaattgacccgttctcgatgcggatagcctcggcagcacctttcgcccgctcgatttccgcctgcgcgttgagtttctcggcttccagattggctttcgcttcttcaatccggatgcggcgattttgctccgccttggcaaactcggcttttccggccatttcctgctgccaaacattgtaggagggacagccgaccaaaagagctgcaaccaaacaacagatgaccaatacaatggcaatccacccggttgcgtaatatgtcgttttaccgtcgtagccgttcgatgatgcaaataatttcataatgtttccttttttgtggattaatttttcagttgtttgctatgtcatactatggccagaatcaatgcttctgtgcatattatctgccccccgcaaatcgtttgctaattgcttatcgcttacaagaggcagcagggccttcataatcatcaactgatttttcaagatagcgctatccataaagttcattgattaaattccggcttaccctttggtaaagggccttccgccgcgctttgtcgagaacgttaatgaccttgtcgttccgacctttcatacctgcggcgacaagactatccacgacgtttttttcagcgccgcagatgaacgatactccggtgtgtgctttcccatcggtggctttgcgcattgcgaaaatgccgaggccacaatccttttcgaagtccgggtctgcatcgatcatcgcttccaattcattgatgatctccttcatccgctggatgaagtccgttgatttgccgggtttcttttccttggcaatgtcaatcgtcgccaccggaagggggcgattcccgacgaggatttcaatgtcgccccatttgtactccttgggcggacggataaggtttgcgggtgcatactcaaccgcataggtcagccctgtaaccgagtcgaggacgtttacggccatctccgtatgcagaactttctttttttcgccgaatagcgacagcggcacaggttcaagttctacaaattcccgttcgtaggggtcggcgatgattttgtactccacgtcgccgagacgggttgtgctgttcgttttaaggcacacggcctttgcgaagttcggcttgtagccgaaaccgatgattgatttgtcgttcatagtggtatgaaatttaatttacagtgggtttttcgtctttcagtcgtatttcacagcggcataatttcacttcacgtccgcttttcagcatatctgaccgtattttcgtggttaaaaaatctgccattatcttgcgcaattcttctgttgcaataagttcatcgtcaaagtcatcttcaacaatcaatgattgggttattatcactcttgccatagttctgcggattatagttgtttgatgatgatgtcggcaaaaccttccgttgtatttctgacgagttgagcgagaatttcatccgggcctcctttgtagtccatcagcaacccgacggtcacatcatacggaagcaaaatagagccgatacggatttgaaccttgacaactggccatgacttgggaagccacgatacatgcacgttgcagtccatgccctcggatatggttatgcgcttttccagtacaacggcgcggcggaagtttacacgtataaaccccttatcgacgagccgcagggcgaattgttcgagaaatcgttcttgtgtgattgtcatgtcagttaggtatttgtcgttgttcactctgcgagtagatcgccatgcttaccagctcgtcgatcatgcgggaatctttctgcttattgagaaaggcgttgtagacattgcgcagccgttcgggaggaatgcggttgaagttgtcggacttcgtggcccgacacgcaatcgctttgatgtcggcgatgttctccggcttgccctgcatccgcagccagccgccgatggccgcgatcacctgcttacgcaggcggtcgagtttcacagcgttgctgtcaagccgcttttcgagtgcgcggcagatgttcatcagatcgtcgttgttgatgtccgcagaactctcgacgccgtagccttcgatgatcgcggccttctcctcggcagacaggcgcagcctgctgcaaagggtgtgaaactgccgaagcagccacttctgttgtttttccattacacttgttgccatattattcagttattcaatgtttgccaaatattccgctgcgccttcctcccatatcacgaagtcctcgccgccttcgcccttttcccggtcctcgaaccgcgtcgtcgtgaaaaccttgtacccctcgacgtgcatcttgatgtcggacaacttgcggattttctcggcgatggcgggcgacggtttgcccttgtcgtcctcgtgcgcgaggaacacgaacagcttgttcgggaaatcgttcaccagcttttgataatccgacatccgaagcccgatcagacacatcaccgagtcgatgattaccacgttcgggctcttgcgcttcgccagccgcgcccgcagttccgggatgccttccttgtcgagcaggatcaccttcgccccgacggcttccatgccgacccggttccatgccttttgcagcgagagcgacaacccctgttcgagggagtcgaaggccaccttatcgacgaagttcgtgaggtacttggcgagttgcagggcaaacgtcgttttacctacaccggaattgccgaaaatcaaccacgacccctttaattcgggacggccgagggccgccttgaacgcgccctcgaacggggccgggttgaatttcgcatccgcgacgttcttgttgctgatcgcctttgccatttaaagagcgtttaattgccgtttaaagcctcttttttcgctgcgtgaacacgccgtttcacgcgccgcagatcgcactcacagtcgtcgatgatctcctcgatggtcgcccggtccgtgacgccgttggcaatgcacacagcggcgacatcttcgttgttcacgacgggcatcgggataaactttcgccccacacgcgagtagatttccttgtagccttttcggtttgccttcacgccgcgcgtgatgcgcttcttgaggtagtcggtcgcgcaaatgacgatgccgcactgatcttcgagtttgttgtacaggctgatgaaaaagtacagaacttgatcgctcaacttgtcggcctcgtccatgacgataatcggcgtagccttgcgtttgaggttgtagacggcctcggaaaccatttcggcaaccgtgctgcccgtagcctcgacgcccatcacctgcaacaactcggcgaagaactgtttgcggttccaatactctgagcaagacagcacgaacacgtcgcggtgctggcgggcgtatgtctgtatcgcctgcgacttgccgcacccggcatcacccgtcacggccagcaccagcgcgttctcttgcgcatcttggagcaggtcatacatgcgggtataaccttgagtctgtataactacccatttgcgcgggtcgtaaccgatctgcgccgcgatattacgccacatctcctcggtgattaactcccagttcccgttgaagatttgcgagattgtagcggcgcttacggcgttgagcgatgcggcggccttgttttggctgcccttcaaatcgcagtacgctttcagcaggtccgcgatggcttgtttttcggtgtctttcatatcagtagagattaaatattgattctttctttatgggtttcggggcgatctcctcgacggtcttaacctcgatctccttcacattcacggccgcgagccgccgggcgttgcgctggtccttgtgctggcctcgtgagtcgcagagtaccgcacgggcaagggggttgtcgagttgcgggttgtgggcgaacagttgctcgactcgtttgtccgctgtggcaatgaaccctttggcgtagtcctctaaatgcgtattgtattgcttcacccgcgcgagctccgcggcgtcgccctcggtccgctccaccagcgccatcggctgcacgtatttgctttcgagcatgaaccgcagcgcaccgtcgtcgctcacggccagcacttggtcgagattgtccgggtcgtacttcacgttccagcgaatgtgtgcgtactgccggaaacgcaggtcgaagcagtcgtaagacctgcgggcgccgagcagtttcacattcagtcccgaaccttcgagggcgttcttgtagcccgtttccgcgccgaagttgagcaggtattgctccgtcgatagcggcagacggcggttttcgggaacctcggcccacagtttcagatagtcggcacgcttagcggcgcgttccgcctcgatgatattttcgatctgcatccggcagcccgcctcgtcggggaactccttgcggtaggcgttcagcgcatcggcgttcggctgttttttcttgtccgaggtgataccgaagcccgaccagttgcggcacagttggcagtagccctcgtttaacgaacggaagtaacgctcgacgggtttcgacttggcgttcttcacgcgggcgggcgtcaccttgtcgccagcgaccgcatagatcgggaacatggccttcattgcgtagtggtcgctctgtatttggttggcccggtagcgctggccgaacagctcggctgtatggttcacggcgttgcgaacagcctcttttatcagcgccgagttctcctgctcgccgatggcgtagcctatcgggtagttcgtacaagggtcgaggaccacaaccacggtgagacggttcgagtaggtcgtgacggtatagccgttcttgtcggtggccgtccgctggaaatacaactccacatcccagccgtcgaggctccacatgtagagcggcaacgccgggcggcggcgtttcacctgcatcgagcggttattgtagaactccgaagcgcccaagcgtccggcagccgtttccagcccgtattttttgcgcatttcctgcacggggcgttccgtgatcgtcttccatccaagttgttcggcaacggcattgtagatcatcacgacctgcttgtcgttcaggttgcgggggtcggaaatcaatttgagtatcgtggccttctgatcgtcgctctcgactttcgcggcgttcgcattttggaacttgccggagatcagcacctcatagttcgctttaccgccccggaagaactcgttaaatttctcctgcaaacggcgcggattttcgggcagcgagtgcgggaatcggtcggcgatacggggcagcgcctttgccgccttcgcccaaaattcggacttcttgacgcgcggtttgctgacgcgcatgcgctgcgagttggcccggtcgagccgtgagtggaacgcttcgagtatcgcggcgttataggcgtattcctgctgcttggtgaagtccaagccgcgggtgccgtcgattttatactccgcgtagaagttcatcgcaacaccatccggaacgatctcgtcgataaactccttgctcgcggcctgcgcttgcagatcggggtagcggcggtaaacctcgtttttgtatttcacaggcaggctatccacggcgaacagagcctccgtcccattgcaggcacggcggacttgctcgattctaccacgctgtaccgacttttgtatcgcatcataactgatgattccggcaaagtcgtcatacgttgcgcatagcctattgttgtaaacttccattgtttaaccttttgttgttgctcccgtgaccggattcgaaccggcaaccgtcatcgccttgtaatgtgccgctccaccattgagctacacgggagtcgcggtttcccgctgaaatcgctatatttgtgcgttcaactacaaactttgcgattatggataagaagattgcgccgtggcgactaaattatgtcataaactacaatgatataggcgctctacacgcttatcgagagacaatccttgcaattctaaaaaacgtcgcacgccttcgaggaatcgagtgcgcgatacaatcgccagcgacatcgcacgatgacgtttgtttaccgaattctcaatttcaagaagatagtctatttgaccttgtatatttccggcacggacagccgacaacaatttctcgtagtgagttccggaaaatgcttgatcacatatttgagccctataaatgcaagtgttttgatcgcgtcgaggtttgtgcgcaacttttgagcgctttgccgaaattccctttcccggaacatataccggagccgccttctgcgctatctcgatttgttgtgaaaacttcgaaactgccgagttagcagccatttcgataattcgctccaattcgtcgcgggagattctgtaatacttttccatagaagtttattttacacattcaattttccggagtgctacgcagcttgcaacgaaattcccgacggtcagcaggtgcgaccacagggggttcgtgtcggcccagccgcatacaagcaccagcgccagacaccaccacagcccgaccagcttgcacgttttaggcagtgcgacaaactcacggcccagcagccggatagtccaatatttcagaaagcgtttcataagggttcggttattctgttgccgaggttaggttctcgatgacatcacccgcggccgtcatcgcttcgtcgaggtactcaatcaccgtctgggcgcggtcgcctttatcgccgtcttggaaggcttcgggcatgttgttgtaatactcctcctcttcggttctgatctcttcgatctccgacttgataccctccgtcttctcgataaggtcccggaggtgttttctgcgtgtgttgttcataatcaaaataaggctaattgagtgaatgtaagttcgcgccgcttatcatctatctgcttaatcatattgcggatgtacggtgcaatcgcgctcggtttgacaacatcggaattgtcgccggaatcataatcacgctctttgatacagtatggtaattcttgttcaaaatggcggcgggcttcttccaatgcagctaatattgcctcgttctccgtcgcatagccaccatttggcatgtctatgaaacctgctgcacaatggctgcccgatttacttgtcgaatagtctttgccgtaatcccagcgtccattgggagattgagcagtacggattttgacatagcaatagcggtttgataagtacacgggagtgttcggtgtgacacacacatcagtgacattgaagttgaagccgtgatattgcagcacagattcttttccggtatcaattccggcgacccgctttgcgtccagatatgagcaccactcctcaaaagtgaactgctgtccggtacatcggcagatgtgatggatttttttcatatcatttattattctttactactccgccgcggtcgattgccactttgcggattttctttgcgaggtcggtattggtctgaccactcaatgcctcgctgacggtttttcgggctataccgaacagccgcgccagttttgcgacctcgccatgctccacgagtacttttgccatagattcaattattttcgtatatttgtcgccaaggttacatttgaaacctcgatgcaaatatagataattatctttacttggcaagataaaaatcatcattttttatgaatgaaaaggacaaaataaaacaataccttgaatataagggaattagcaaaaatagattttacaaccaaacagggctgtcggtaggctttttggatagtgggaaatcgctgggagtagacaaggcaaagataattatcaacaaattccctgatttaagccttgaatggctggttatggataaaggcaatatgctcaatactgaggatacacaattatctggggtgaatattgccgagcagtttcctttacgaacggaccggacattggatttacagagcgtgcctctttacgaacttgacgctgcggctggactggtggcgctctttgctgatacaacacgcccgacccctatcagtcatttgcaaatacctaatctgccgccctgcgatggggctatatatgttcgaggggattccatgtacccgcttcttaaaagcggcgatattgttctatacaaggagatcaacaacacaaacggctgtttgctgtggggcgaaatgtatcttttatctttcacgcttgacggcgaagactacatcactatcaaatacgtacagaagtcagaggttgaaggatttgtgcggctggtaagccacaatccccaccatgccccgcaagaaattccgagggattcaattcgtgcggtcgcgttggtaaaagccagcgtcagattcaacacaatggggtgaaaaatattttttttgtgccatttttaccgaaatatcggcataaagaactgaaaacaagacttataaatagcaaaaagcaccgtgatttaccggtgtttttttggtattatagggggtcgaatcgctgaaaaatgcccgttttttgattgaaatatggtattatagggggttgaatcggcttaatttgtccatccaactgtccgcccaactgtccgtccaactccgaaaatgcccgttttttcgacaaaacgaaatgtacaattttcggggaaaggtcgaaatatggcccggttttcaaaggctgtttaaggagcgattaaacaccgggctgctttgcccttttttcgccgatttcgcgccgtcaggtggttctcgttaggaaacgggcacaaaaaaagcgtgcaatcccaatacacgcctgtaaaatcgaatctaaatccaagtaccggagccgtccgaggccgtcaaatcacggtataatcccaataaatcacatttcgtttttcgagccaaaatttgacgctctgctgtaagttattggttttctgtatgctgtactgcttttcctgctatcctctttgtacttttcgtttgtctgcccataagacctccagtaagttcatatatctttataaaatctattaaaaaattagatatatcaggactttttacagttttcacgagccacagcaagaaatctctgtctttctctgtgatcggttgaaccctataaaaatctttgctttgggcaacttttttcaagtcgcctctaactgggattggctcgccaccttttatagactgataaagcgttttttccgaattatgccataattccaaatagcaacgagggacataatgctgatttcgctttttctcgataaatttcggagataagttaacgccgttttctgcggcccatttctcaattatcgcatgtgcttttttagtagtctctacaatttcattatattccgactcatcttgtattttggtatcaacagccatgttttttgtgatattttgttaaatattcatgccgcccaatactcataaaattgagataggactcatggtagcgcctccacagatcttgtggcagcacatgcgaatgtgctttgatctcatcatgagttagcgtgtccggcaactctactcctgtaacaacgaaataagctcgtcgcccggcctctgtacgtgtatattctcccttcggcataaattttcagttattttttaggttctggcagtacgtcatcagcaatctcgtccagaagcattgcacatatcgcctccttctcttcatgtttcaaggcatagctgttcagtaatgccttcagatacgggatcgcccgccggacaaattccgtatcggcttccggctttatcattatgcgaccaccgccaaacaaccagccgaacatctggttggctttcgtatgccccatgtagaacccgcggcgcttcgcctcctcaagcaatgccgcatctgccttcagcgtggagaatacctcttcgacacgtttgatctcgggaaacggataggccatcaggctcaatctcaatttatcttcagtctccggcatatttcatccaatttgttgagtcgtgaagggaagaaattgtctgttattcatctacttgttcggtatcgactttccgcagcctccatgcaacagcatatccggtttcgatataaggataaacccagttacatacatggtcgcccacgatcttccggatcgtcccgtctgaaaaaaggacatcaacaaggccggtcgtcggaactgacttcgttgtaggctcccagccagccaataactgatgccgttcatcagaccgggcacggtcaatagccagataagccgtagacacatcgaccatgttatccccgttattcattttgatagcatcgttgtcgataatttggtatgcccaatccttattttccatctttttcccattgttcttcttgggtctgctcccagccggctgttttcaaatagtgcctcatacgctcttcaggaatagacctgccggctaagaacaggcgtttgtcccgcacagcctgctgtctgatatattcgctgtttttgtaccaaagaggctgcgttatcaataaagagaatgcttctttcagtgtcataagatatatctttggcacaaagatagtaagcatttcgtcaagaaacaatttcgtttccaatatttttcactcaaaacccatttataccatcgtatagactttatggacgatgattaaaaatagtacttcagcccgatattggccatcatcttaacattatcgaactgagtctttatcaggtaggtcatacggggctccagagcaatagcccaatgccggccgaggacatactcgacgtcacactgcaacatgaggccgtaaacaaactggttaccgtaaggcagaatgttcccttggcgggatcgctgatcgcactgctccccgcccagaagtacgccgcctgtcggcgacacgataaaccgtcccagcgggatcgcataccggtagtgcaataccccaagccactgcgacgtatggaacgagtcgccctgcgtcgcgtcataacgggttcggtcaaggataatcccggcccccaagatcgaacgttctgaaagatagctgtcgatccgcacggtgctgacgaaccctccgacattgcttattccaccgctgactccaagagccacctgccccttatacccgatctgcgcccgagcgctcatggccgcaagcaacatgacagccaccaccaatgccttttttatcatttcttctatttttaaagttattatacttgccgcgagcgaaaatgccgacctcttcgatcagcgttccgagtagcgataaaatcgctttccccgtcatattgccgagctccgcccccgaagagagataccccgacaaccccatccgaaaaaacctcatagcttgcgggcttcgataatgaacgtttctgggattcgcagcccgatatttcgatccccgccctgttcgagcacttcagccagcagcaccttatccttacctatggtaaacttctcaaagcaatagatcacctcggttatactcttcgcccctatcgtatggacatcgacatcggccccgacaggcaggatctgcaaccgctcctgagaagatgttttccgggtcttcctcgccgtaaccgaaaaggcgatatagtctacatcaaaaggcacgttgctattgttctgaatgctgaatttgaaaaatatatgcgtcctatcgacatacacgcccttgagcacgaaaatcagtttttgcagtttcgcaacattgttggtcacaaggtatgccccttgttcgctcacctttgaaaacagggatgcggaatcaggcagcactgcttcggctgccgcgaccgcatcgacgtccggcacgcccggttccgccacagccggggcatcctgcctcccggcttcgtcctgataaaatgccattgccggccgaataatgtagttcacgcatttcgcggcatcgttatacaccagattaaaggcatagtagtaaccatcgctggtcacgacattgaggttcgtttcatccagcggcataaccggctggatgtagagcaccttgccgtcactctgtgtcaaagcgtcgaaattatccgagggcccggcgatgtaaccagtcctgaatttgacaatatccgcaggaaagatcatttgcgtcaccttgtctttacgccactcgatcgtattctggccgtacgatgtagttgccagacacccggccagcatcaagaataataatctcttcatttttctacgattttaagtattacggtctgattatctatcagcttcacctcggtgctttttgcagagcgcacctgattgcccacaccggacacgacagacccgacgacacggccgatcgtacctccataggctgacatcgccgtgctcgcctcctgcaacatcgacgaggacgattccgagttggttattttccccacctcgtcatagtccagcggaatgccggcgatcccatccgatccatacacttccaacggcaatgcgaaaacgccgttgccgaggcgtacggaatttatatttatcgtcagacggttctcggagatctgcgtatatccggccagaagcgtattctccgggatcgtgacagcaccatagcggatcggctcctttgtccggaacaaagcggtctggccactgcgtactatctgcgttccgtgtatcacggcccggaacatcgcaggccgtgcggaatcgctccgggcagcctcggaagggctgcccataccccagttctggcgcatggcccgccgacgtcgttcttcgggcgtctcggccggagccggcggcacgtccgcagcgggtgtctgctgcgtcgcaacttccggctgctcccgtgccaccgtccgtgtatcgtcaggcgcttcctcgtatatgctccggacattccgggagatctcttcgtacgcctgctcgaaccggatctcctgcgccttattctctacggccggagctgcggaagccgcggccgcagccttttcagcctcgggtttcttacttacggcgggcggaggtgcgaagctcgcggctgaacgccggtagaattcatccttttcattggcgtaggccatatacgcttctgattttgtcgtgaaggtcttatccgcaatcgcttcgccgatcgtctccacggaattcctcttgccgggcctatcctgatccttcttcatcagataaagcgccagaaccagcagaaccaaggctccaatgactatcacgctgattttaattaactgcttgttcatcttccttgacttgaattattttccgttccaaaaacggctcgatccacaggccgtgcgggttgttgggccagctgcgctcgatcacccggatacttccgtcggcgaacactcgccagagccgggcgtagccggtgcccttttcatgaagatccaccgccatttcgaacgcaaaggtgccatcctcgttcggcgtgatccgaagttccgcgatcttggcctcatagcggatgttaccctggataaagcgattgaaaaaaccggcttccctgcgcgcgatatacatatcccggatactgttgccgccgagccacccggcggcttcggccttcgcctcccatgtatcctgcgtcaaggcataccaatcatcgacgaacatggccaggtgatggcgaatctcgatctcgatattatccctgcgctgggcataccgtgccggaataacttctccgtccgtagccacgtagtaggagaactccagctgcttgccgagcgtttcccgacgttcgagatagttgagtataaacgacaccagcaccagtagcaggcacaggacggtaatcaggttgttacgctccagtatttttcgaaacgactgtattttttcagggatcatagctacattctgaataatttataactcaattccatgacgctttggtaggctttgaatcgggccatggcgatcataaagaagccgaggatgggcgaacttgcgtccgaagcgtaaattctgaaacattcctcgcagaaggaatccgcgacatacaacatggggctgcaggccagcagggcgatatagatcataaaccactgcttccaaagcgaccggaaaggcgacatggcccccagcaccaaaatcaacggggcgctccagtagataaccttcagccctacggcacgtatcgtcagaaacgtcgggaagcacaggtaattcaccaggtcggcaaaaggtttcaggactccctgggcgattagataacccgctgcattctgacctgtcccgctcttgagaaacgcattcataagtatattcccgaatgacgtggaggaatcaggcggcggaacagacccgtcgccgagattcgactccttcataaattccgcgatggcgctatcggcatggagctcgataggcattagggcattgaccaatgtctccatgaatcgtatcagctccggaaacaaatacacgaacaatccgcccaggaatacccaggagagatcttcccaaatatccttcgcgggattattcttcttctggagatagatcataccgccctgcaacagcacgaagaaccccgcaagacgacttacttcaggcgggatctcaacctgcatgttggataggtctgtgagaaaatcgaagcccatatcgctcagaaataggtgtttaacatttcgctgttgtacttgatcgctttagcctggacgtcgatatagctgacctgcgagttcagccggtcgagatcgtcgaggactttacgggtctcggcaaggcgctccgcatcgctcatcaccagaaacctgtccgaaaagacctgggccccgtaagccgtcacgtcgatacattcgcgcgtcacctggttgcacaaatcaaccaaactcgtggtgtactgcacatcgagccgaaggttgccgatcatttcatagacctgcttgatacgccccacgcacgcggccgaccgggtcgctatctcctgcacgtcccggatcgtggccagtttattattcaccttttcaaccgcgtcgatgcccttgttgataccgtctttgacgttgaccatcgtttgataggtctgcaccatctgttgcagttgctcggcatggttcatcgcctcctgcaactccaagctcggagccacgacggccacctgagcctgtgcgacaccccatcccagtataaataatcctgctaataatatccgtttcatagtctgtaaatattaaattattaatgttctttctcatagagttcgatcgccgcggccatcgactgcgtttcttcatacaacttgcccaactcattgcatatcttaccttcggtctggaacgccagatacgtcctcgggctgacgcaaagcgtcattatcgtagatttcttctggcggaaaatgtagaacgacgagtatctgggatcatccgtatagttgttctcaagggcaaggacacagttgcggtcatgctccgagaaccgcttggcatacttctcgaagcctgtcggatctgccccggcgagaaatatcgtcgtggcgatatttttcatcagcgcacccgcagctccgccttctttcttgtagcgatccccggcattcaaggccagctggtcgaggttctgcagaacgatacatgccgagccgtccttcttgcgaatcgcctgcatctgatataacacggccgaaaaaatcatgtccatctgcatcagctccgcgaactcctcgtaaataatgaatcctcgtttgccgggctgttcccagacaagggtgcggatcgcaataccgatcaggtggactacgatactcagcaactggggcttggccttgatattctccaattcgaagatcagcagccgcttacccttgagccgtgccgtaggattgtcgctttgggccagcacattctcatagacacccccacagcaccactcgctgccgttatgtatgaactggtttatattgaaatactccggccggatctggcatccatccagaatttcagcgtaattattgctcaaccacgcatagaacccgcgccacgacgactctaaaggcaagtgcaaatacatcataacgattttgcgcagcgagaccctctcctcggccgacggcaccgcatcaggcttgatgataagccacaatgtctcgcaaatatcgtcgacccgctcctcttcggacgaagagccgaaagcgaacggatcgagtcccaatgcctcactggggctatatctgaaagtgaacacttcttccggatcgtacaaacgcgcggccttgtcgtaagagccgccgcaatccacaatgatattgatgtattcggctgtcttatcatggtggtaggcatccacgaccttctccaaggtcacggttttaccgcctcccgtcataccgaccacggcgatattcctcgaatccgcatacttcttattcgcatcgtaaagatcatagcgaagcggcatatgatccacaggatcgctgaagaacacaccctcggcatccgactcgtatcccccgacattctggaacaacgcgatagcctgtgttatatccgcgatataataggcatcgctgtccatgcacgccacggtcgcaggattggagcagtagacgacatttcgcaattccacacccgtcggcaccacaggctcgaaatgccgctgctgcttgaggaaattcgtgacgatcgtccggtattccttgacctgttgttcgctttcgccccagtagatgatattcgtatgcccccggacaagcatcgcctccatgttgtcaccgatattatggcgggtcgtttccattctattgcgctgatcctcggcatcgtccgaaaaaccacggttttttcgcagcattttcaacgtcgcctcgatcatggcatactccgtatcatgcccggtaatcgtaatgatctggttgcagatgtgcggaaaaggcaagccgatacccaaatcttcgagcgtgccgatcggaactttcaccccacggcccggatagggcgtgcgcagcacttcggggaactggcgttcatgctcgatgctcacagctccgacatagttatcgccggcacggacatagcgtttcgtagcgtaaacatccgtcaggaaatcgctttgataaccgttgaaatagtagtgcatatattcccggatctccggctcggacaaaggccgaatatccagcagtcccgatccctgcaactgcaaatacatcgaatccagcgtattcaggaaatgagaataggcgccatcctcttccttgaattccttatgcgaaagggtgacaaaagggttctgtgatttgggattgcgcgtctctcggaaacccgtatagacgatgaacaggtacgacgttccgttggttttcaggcgcgaccgggcatatgccttttcctcgcgctggatataggacatctccggcatacacgacgcatcgaagtacgaccggtcataacggtcgctgcgcatgatgatcgtaccccgcggcagatccttcaatgccacgcgccagatctctacgatctggtcgtatgcctccgcagtataggaataggccggcggtaacagaagacggtaacagaatacgacgtccccctgctgcgttatcatcctgttgttcgcgtactcctcgaccagggacgaggcatcgtactgctcgctccttgcgcgtgaatacgactgcacgacaagataaagcaccagcccgacgatccctatgaacagtatgaatacagctacgagcatatcaacggttttttaagtgagaggggaactgtttcccataagtcaggttccgggacaggcggtctatattgcggaatatccaaaaaacgacaactccccacggaatccagaacaggacaaaaagcggattgaaaatgactatgaggatcggtatgcaggcaatacccacacatgccatgaatcgctccgcaggcatgcctgcgaccattacgcggtcgcgtaagcgtcggttgatataggactccattatcgcaacagaacattcataccggcatagatcagacccgtaattatcgcaatgacgatcacggcataaagagcgttcgagaggatcttcttataattttccccgttatccatcaggttgtttaccatccagtagaccagcgctacgagtgcccccaaaccaaataatacgggaatgagggtcttcacatcgctttttacagaggaaaggctccattgcgatgcctgctgcgcgaacagcgaggtcgcataaatagtcgctacgatcgtaaaaaacagttttttcataacaccttatataatttattgttaattaaatgattgcataaattcattcgcctcccggcgtattctgacggcaatttcgtgcagcgccgcacgatccatactgcggattttcggtggtagttctttcttcccgctgatgtgtttgaagcggaagcgtttgacatccccgtagaagtacacgaactccccttttttcaagaggtagaaatcgctggctatatagcggggctgcttgacgccgcggctcgtaaccgtcgttccgttcgaggacgaagagtaggatttctcggttttcacgatccggggcatcagcccctcgtaatatttcgcggtctgctccgtgcgggtgcggccgaagaattggtgcgcaaggttcgacaggactgtacgctggttgaactccttgcctccttgggtacgttgaatctggctcaaatcctgagtcgtgtacaccacacagacatgaaggctccgaagatacgccatatagttctggacgcggggactgggaagctccgcggcttcatccagcagcgcgaccgcataatcgttatcctgatcgcccatcatcagcaggcccgcatcggcgatcatggccaggatcggagcgttcgaggatgaattcttgggttcattgaccaaagccagcgcttcgcagttccccggacggttgatccgcaggtcgatgtcattgccgctcagcaggaagaaccccgcatccgtattgatcgtattgagggccagaatgactgtttgcaggatattactcgtcgtttcaggattatccgccccctggaagaacaccgacgccatagaggaaacctgcggatcgcggcccaacatcttcttcagccttccgaacgggatcacctttttgccttctttcaaatgaaggttatccggatcgtttattatcgacatcagaaaaggaaggtggcagcactccggtttgtagagcttcagataccacgttatgctttcaagcagcgaggctgccgtatttttgaagaagccgcccgtcgatgtcgaatctctcgcgtcaccgccctgcgcagctatcaggaaagagtcgattctcgacttaagcgactgctcgtcttcgatgtacatggggtcgatcggatttatgcgcacacagcgctcatagtcgaacaacgcgaatacatggtagggaatcccggcctccgcaaagagcggatagactgcctgcgtaagctcgtatttcttcaggtcgtgcagcagcatggacatcctgaacctgacggcatgccgcacaaacgccatgttgcagctctccgtttttccgctacccgatcccccgttgatgtaggtctggtcgtcgatacgcttgatttagtgcacatggccccggctgtcctcgacctccattgtcagtttcgaccacccgttaacgcaccgggaaacgcgaatatacacccaccgatacgtcggtatcaacacaataagccctgcggcaaggggcagcgcccacgaccaaaggtaagtcacgatctccagcccggcccagacgtagatatagccgggaaccatgaacgccaaaagtatagcacagacacccagcggcttgcaccagatataaagtaccggaagcagggctgccgctatcgccaaatattcgagcaggttcataacgtcgattgatttccaaggatcaatactataattatcaacaacatggcagcgacagcgataatgatattcgaacgctccacaagcctcggcacaggctcggaaccatgagcttgtccggccttctcgttttcttcccggtacttcttatccagcatcgcctgcttacgcatcatataccatacgaccgccagcaagatcccgcccagcagcttcatggcagaaagccatgtaaattcatatccattcatctgtatcaaatatttaaatccgtgttccgtcggtttacaactcaatatcctttcgtgagtacattcaaaagtttgaaagcgcctttcagcaacacctgctgcggcgtcaggggtatgaccttcaccagattggctttcgccatcgcttgtaccgcaactttgtgacgcgcagcatgtccgaaaatcttatattccggggtcgggagtacggaacgtttacaggctgccgcaaccctgcgctgcacctcttccttgtaggtcttagccacagcaggagaaaaccgcttattgatgtaacggttgatatagttttgctgattacgtacctttgcgagttccttcgagggaatcttcgtcgagacatactcctggatcagctcccggcgcttctcttcgatcaggggatagatcttctcctgcaaaacctttttatagtattgcgcctgctccgcagaaaacgccttatccacgtaggctgcgaattcgtactcgtttttcaatcggacgtccgggccgaactgctgcatcccatatcgctcgaacagcctttcagaatgaggcgacaactgccgcatcaactcgttattcgcgtcgagcagccgctcggcatatttatcctgatcgggggtcagttcgcgtaacaactgctccaactggctctgtttttcgaccacgacatgataatcgggaagttccgacgcgagaaatccctctatcgccttcgccaactctgcctgacgctcgatctggactttctccagcccttcgaatatttcccccagttctttgcgcagagcgccgtatttcatgtcggggtgttcctcttccaatatgtttacgacaccccggcgcagatcgcggatcgccttatccagttctttatcctccagggccaagcgtaatagggtttcctctttcgcatggacggtcagtcccctatccgcgagaatctcctgcaagcgcaccaccggctgtccccgctctgcgacatacgaatccagtttcgcggtcagggtttttacacgctccggttccagtccgaggatctggttcttcagcgatgcgaaatcctgcggccgctcgcagcgttgcgcaacttccgagaccctcttccgggcttcttccggcagcaaccgttcacgcgccatctcctcgaagccgcgcagatcccggatcccggcagcgtctttaccgaagagcgcgaaggcttgacggttcacgagctccggctccctttcagcccaatattcccggataaaatccgcgactaaacgccgctcctgatccgccatgtaacgacaggcgttgtccaggattaccgaccgcccgagcctctcctccaaaaattccgtttttacaaggaagcagtccgtatcccgacgcaatttgatactgtcgaaaagataattttcacggcaccatgtgtcggagtatatctcgacccacttatcgaaaacttcgcgccggcggtcgatggcacgacgcatcacgataccgcgcctcagtaatttatgggtcgtatatatcggactgtatccttggaatcccgcggactgaatcgttttatctccgacattcgcagcgacgccttccgcccaggcaggcattgccacgccttgcatggtgtccagccgggccaattccagctggagatcgtgcaagccgcactccatcagttcatcggcattcgcatccggactcagggctttgatctgccgtaccaactgccccttgatctggtacaactgccgggcatcgagggattcgcattgcagcaaattttcatagtattccccatagctgccgactttcagccggcggaactccagggcctcctgccgccggacggcgcgatctttcataagctgccgttcgtacgcataggaagactgtttgcgcagatgcttggactgctcatagctttcggtaatgagccggctatgtacaaaggtcttatcgaaaattcgctcgcacgcgactttataggcttcgcggttaaaccctatcctcactttccgaccattcaggacatgcttcttactgcctcggccattggcattgggactcaggttgaaggaattcgtaatatcacgccggctgacagcgatatgcacgtgccagttatcgccggtcttggccatcatcggatgaaggatctcctggctcccgcccggacgaaccttgttttcacggataagtttccgctccagcgttgcaatcttacgagtgatctccttctcgttatcctcagtaatacgctgccgcagtttctcgatctccttataaatttgcatattcttgcggacttcgggatcgctctttttccagtagcggtctttctcgaccatgccgaaccacaacagatcgttgttatccttaacctcagggtgtccgaaattgcgggcataggcatccatacatttcaccgcatattccttgagataggtgcgcataagagtatcttcgagatccgcagggacgacttcaccggcatcggagagcgcttgccgcgtgtcggcaatggtacggcgcagatgcgcgatttcctcgccggaaggagaaagcgagaaggtataataacgggcctccttctttttcagacctttgacattggcgtcgatcgccttcgtaacatcttcacaatcgaaggtactgccacgcccgttgaaaaaatattcgcgaccctcgacacgaaccgaatcgttttgtttatccagatatgcagacaactgccgggaagtagcgttccccagctgctcctgaacaagactttccttctcaagatacccggcaaaatccatcacagaactctgaccgtatttggtgttatctacatagtctgtgatatacataatttttcgtattggctcttgtaacgcacataatcctctttcgacagacggatttgcataatcgggttgccccggaaatcaaaggcgtcggtcgcagttgtgaagaatttttccaaaagcgacagcgcttccgagagtcggctatcctctgtttggacggctgaatcatcatcgagatccggagcaccgggctcagcatattccgaaagcactggacgatcatcacgacgcagcagggacttgataaaatcttctgtccgcgataccgaacccgcaactttcacaagcgtgacctgatggccgacttggttttggagaatagctttcagggcgtcacctgccgagacctcataatccaaattattcgtcgcataatgcagaataattcgtgaggcagcaatccccaaagtcgtacattttcgctcggcaataacacataacttttccttagcttcttgtgttaatcgtaccgcagaaaggctctgtttccccgtaaccttttttgccattttttatgagatatttgattaaatcgcccaaaacaagcgaaaaaacacactttatttcacaccgcaaatataattgttatttagttatttaaagtatttttatgtttttattgtgtattttgtatattacgctcataacataaatatattttatttaattgtattctaataatttacaatgtttttacaaagcgaaatgattcttccatcagacaacaaacgaaaaggctcagttacgttacttgcaacaattatttttctacaaatcaatacattacaacaaacatgtaacgtaatatgcaacaaaatcgaggaaaaattgcatccggccatcccacataaacaactacatatcaacacattagcaataaaatcataaaaacagaatcacgcttcagcgtgattcccgcttgttcacagaaaaatgttacaggatcagccggaattcggcggacgtaaaggcgacccgaagaggggcaaggcgtaatgcccctcttcgggtcagattgcgcttgcgtaatcgcgccttcgtccgttgaaatccggatgtccgtaaggcatcgggcgggcaccgggctatggaaaatttccagaattttccgaagcccgttgtccgtaaaattcgccccggcagagccggggcatcgggcgggaataaccgcccggaattttagatgccggtaacatttttttaccgatctccggcgtagccgggtgggcggcaaatagccgcccgcggacaaaatcggcccccgtcgattttgtccgccctttgcttctttcttcacgaaagaaggaatcccccattcgggggagaaaggggggctttgtcagccgccaaagcgaggctccggcggagcgcatggcggcgtacagacaaatacctataatttgcgccgagcttgtcgaaggcgcaaatcgcggcaccgaaaatctccgcaaagcggagttttccggtgcccgccccgccgaggcggggtgttgaatagtgaagggaagaaagataaaaccgaagctattcaccgaatccgggttgcgaaacacgcctcggctgcgtccgcagacacgcggcgaagccttgggccggaaggccgcgccggctttgcgccgaggacttgggcacgtagcgggcattgccgctacctgcccaagaaacggggtgagtgacttttcttgggttccggtttctttgtgtcttcaagacaaagaaagcggacgcggtttgaagtgcaccccaaatattggacggattagtatttgtttagatggcatgagttcggtattgtaccgggctcatgttgtttaagtatttctttatccgcttgttattgtagtagtcgatatattcttccaattcttttcggaaatggtctatggatgagaatttttgcaaatataataattcggacttcaataatccaaagaaactttccatagcagcgttatccagacagttacccttgcgcgacatgctctgtgtaatacctttctgtcttaaacggagctgatactgcttcatctgatactgccagccctggtcggaatgcaagacaatacccggagaatccggtattctggcaaacgcatcgtccagcatcttcatgatctgcataaagttagggcgttcagctattttatagctaataatctcccggttatataagtccataatcggcgatagatataactttacgccgcaaaccgaaaattccgtaaggtcagtaacccacttctgattcggtttttcggctgcaaagtcgcgttgcagaagattgggcgctatccgtccgatctgtcctttgtatgaacagtatttacggagcctgacctgactttttatcccgcaaatattcatcagcttaagtacggttttgtgatttatcgcatatccgatcttattcatttcaacggtaatgcgccgataaccataacgccccttatgttcgtgatataaccttataatactctctttttcgcgagcatatttatcgggttgttttgattttctgaagtgataataaaatgtgcttcgcgccatccctgcggctttgagcaatactgaaagccggcactgcggccttagtccttcgatggcttgggctctttcccgctctcgcggacaatgcgctcctcgactaaggcctgcaatttttttaagtaagcattctcggcacgaagatactccagttccttaagcaactcttcgtgcggagtcgttttgagtttgacttttttagtcttcgatttactcatggccggcctccttctttgcggtttacgccgcaggccttcagcaccttggttttgatagagccgctcccattgacgaataacaaaagggcccggaatgccgaaatgcactgctgtctccagcaaagatagatgattttggtgcatatgcttcaaaactgacaacttaaattctgcactgtagctaccgtggcgcagcttaaggccggcaaggccatggcgctcgaataatgttacccacaagtgaacttgcgagcggccacagcccaagtgacatccggcttccctaaccgaaagtccgccttcgagtaccagttttacggcctttaaacgaatctcataattatatttcataaaaaacaccccaaaagtgtccaacttttggggtgcagtacacttttgctccttttatcgcgctggcaggataaaaggaggtctcccctgcgggggacggaagggggtagcgaggagtgaaccgaaccttttgagcccttccacggagctcgaaaggagaggcgcgacgagcgggtcgcgcttcgaagggcacgaagtcatcgggttcgtgcccgcagccggaggcttccgctctctgcgccgatcggcgcaggtaggggcacgtcccggcgcagcacggccgcattgtggccgtgctgcgccgagggcgacccggagatttctttgccccgctttctttggctcccgtaggcaaagaaagcgggcgggcttttgctccttttggcccggttccaaaaggagacgcatgcggacaacacaaaaatgccccggcatgcgcaagctgccggggcataatgtcgagcaaaaccgctctaagcgaccatcgcgcatgcgagcgtagcgagtcgtcgggcatacctgacccgacgcgatggccgcgcagtctataacgatccaacccggccacctgtcggctcagatataccgacaaaaacaacacccctcttaataaatcccggccgggccatgaggctccggccgggatgttgatatgtgaagggaagaaaacaaattttacgccgcaaaccgctgcggcacgatgttcaactcgtaaagtttcgccaccagcgcctcgcagagaacccgcgccatgttcacttcgacggcgttgccgataaattttttctgctcttcctgcgtgccgatcagtacgtagttctccgggaagcccatgatccgcatcagctccgggatgcgcagcatccgcatccggatgtccaccagtccgtacagcgccatgaattcctttatccgcaccagcatcggcgtatcttccgggtaaatctcgtaaaccaacgtttcgtcctccagcctgatgaacgagggcagctccttgccgtccgctacggccgtcaccagccgcggaggccgcttatccatgcgggcgatcagcgtgaaacacggccgatcggtagcggtacccgccgaggcgaactgcgggttcatcaggtattgccatttgcggttggcagtcacggtctgggccggagcatcgagcgaactgccgacgttgctgaagttggtgttcatgatccacggcgtgacgagccgctgcttcgggttcgtcatgacggccggagccgggccatccgttcctgacgtctggccgccgccggaatagtagttggcgaagaacggacgcaccaactgaaagcgatcctttgtcgtaaccgtcggtgacggccgctcgatcgacgagttgaacccgttgccgtagtaggccgagacgaaggcgtggtgatcgcggcaggtgatcgcgcccgcgggcgcatcgacggctgtgcatttcccctccggagatccgccgaagtgcttgcagaggtagtacaccttggctacgccgagacggttctgcgtcgccacggtcgggcacggttcgtcgatgccgggtgcgacatacttcccggactggttcatcgagttgtatttgacgaggaacgcttcgcgcccgccggcgacgaacttcaccagccccgcgtggatgcgggcaagcgatgcctccacgagcgaccgcttccggtcgaagatcgactcgccctcgtcctcaaggtcgaggacttcccgcactggccgccacttgcgaagctgctggccgaacaggtcgccctgtgccgggttcttggtgtgagtcggtttcggaaagacgatcggaaggccgcggcgggcgaagatcccgaagaaccgccggcgggaagtgtacgccccgaagtcggcggcgttcaggatgcggtggccgaagtcgtacccgtagccccgcacgttgtcgatccatttccggtacagtcgcccggcatccctgctgacgggcttgcccctctcgtccagatcgccccacgacataaactcctccacgttctcgatttggatgtagtcggggttcagcgcctcgatgtagcggaacaggtgttcggccagcgtgcggctgtcggcgtcgcgcggaaggccgcctttggcccgcgagaagttcgtacactccagcgaggcccagaggacgacgaaggcatccgggtactggcggcgcatccgcgcgaggtgttcgaacagcggcgacagctccagcgtacggatgtcctccgtgtagtgcagcgcatcggggtggttggcagcgtgcgaagcgatggcgttggcgtcgtggttcacgcaggcgatcaccttggcgcaaggatctccgccgtgccgcgcaaggtgtaccccggtcgaggtgccgcccgcaccgcagaaaaggtcgatgtacaaaagtcggattttatcgtttgaattcattgggatagctttttttaaacaggagaaatcggcagcccggccgtgatggccgggctgccgtgttgaatagtgaagggaagaaaaacaaaaatcgttaccgtccggactccttgattttgatttcatagttgacaaactccccgacccggctatggccatacatgagttccagaaaatgctccacactttcaaaggtgactttaattccatgcatgtcgcaataataacggccttgcgtactctcatacaatttccatcgggcaaaattccaatcttcgatcgtataccaaaatccgtcgtgtgttataacaatcgttcgcatagtaaaaaatagcggctgacctgtacgccgcaaggtgtcagtagttgatgatttcgccattgccgatcgtgatttcccgaaggacgcaatcgacggtgatccgccgcccgtcgatgtcgatctgccagccttcgcagaggttccgagcccagaccagacgggtcgtatccatttgcaggccgtagtagatccggcggccttcgcggaacgtgaagttatgccgccggatcttcgtcgtgatggtcttaacgatgtccataccggtagttttgtgcgacgtagcgcaaggtgaaactcttgaccgccctataccacgactgcggcgtctcgatcgagcggttcatatactccttacagctatacttgccgttggccgaaagcgccatgtactccttgagctcacccgtgatccgcgtccgaaacaggtagaaccactcccattcgcaacacagggcgagcttgtcggcatagcacaaccgcgagggccgagcatcgtcccgtcgggagtggaaccgggaatgatgccgcgtgaactcttcccagcgtcggccgaagatccgcatgatccgggcccccagctcgacatgcgtttcgccttccgggccgtccatgttcggcttgcccagatagccccagtcatggacgataaacgcaacccagagccggggatcagccgggaatccgtacaaccgcccccaagcgatgaaaaccagaaaaggatggataaagatgttatgtgctccgaacaggaggcttttcgtacctactttcataatttgcagaatttaattacaacgacatgacggccgccagttgggcctgacggtatttcgggaagatccagccggcgaccttgcggccctgataagtcagactggagttgcgcttggccttgatacgctccagaaccgacacatcggaaggttcgtcggtaaagatggccagggccttcgctgaatagtctacgacaagagccccgcgatgcagacgccgctgggcgatagctgcttcctcgcggcgctgcttctcggcggccgccgcacgggaaatgacctcttcgacctgttcggccgccaagaaggtcgggtaagcgagatccgcgaagaatccgctggccgactcgtgttcatcgaagatgaaacgcgtgcggaagttccggagcgacttgagcccgatcagcgtgtaggtatagccggcatgctcgtcgaacatgatttcggtgacgatgcacttctcacaaagagagtccccaagcatgaagcgttcgaccacctggtgcaacgtcacgacctgtctggacgtgtcgtaaacgatgcctttcgttaataatgctacctgtgccataatcctttgatttagggagcgggacgtcgcccgctccggttttcgaatcgtaaaataatctctgccttacctacgcaaaactcattttgttgaataaattacgggctatcgaatcggctgaaacccagcacaacccgcgagtagcctcaaataattcgacactggcacacatttcgccaggactaaaaagctcttcgcgccgtacgtttctaccgtcggccagatccggagcgatctctaccgctttgcaacacagatcggcacgtacacgatcgctcatatctcggcgaatcagcacaaactttgcaccgccaaaaattcgggtgaattccgttggacggtaatcgtaataatcggtcatagcatcgcattgactcgaatcataggcgtatttattagcgatcgcctcgacctcttcaacctttggcccgtcttcatatgatactgttatctcatcacctccggaaaaagatttataacgaaccgagaatgtaatttgcggaaatacggcccgcaattcgcggcgcagattctccgcggcactcttcgggtacggtttcaggtcaggataccgggcaatcatttgttttgctgcattgttagaatcgtttttcatagctgtaattttttaagaatttgaattatgcggcatattaccaggatattataccatatctttttttcagcaacctacgggctgcttgtgttccttcgttatccgggtgtcctctggccacactcaagagggcttccaatttcgtttcatgcggcgggattatctcgcccgatttcaccaaattgttatattcgtctatggcggctttgcgtagcttgctgtattcaataattgcagcctccgcctctttctcgaatcttttttgcccccgagccgttaagcgcatgtttcgccatttgtcatccatgtacccacttatcggagacctcagccctcgttgccctaaataatcatccagtgatatttccatagcattaaaattttaaaatgtttgtatttgcgctccgctggggcttcgctccccgccatccgccgaccacatcgagcggagctggttaatacgtcaaagaacttgttgtcgaaaactcgctaacatcctcgtcacgccctttatcctttctatcgaactatcattttctcgaaggtttgccgggctgtgatttccctgccgacggatgttttcaagatttcaaagaacgagggtcatccccttacacgttgccttcagagcctttctgatactcgtatgggacgctgacattttgtaatgaacatggagcggccgcccgctcctctggaatgggcataggcggccgctctctaccgctgaaccggcgcaagggttccgggaaatatttttgaaaaaatttcttcagagtgccccggcctgccggggtaaattttttcatcataaacatagttcccgaagggacttctaagaaaatatttcccgggttcattgcccggcaaaatgcagggtcactactttgtatcagaatggcctgaaggcaacgcgtatggggtgacccttcaggtcgcagaaaacttgaattctgacagaggccgggtaaaaacgcagcccggtcagacccagagagaaaataccgctctccctcgcaacgcgaggggtgcactgccgcgacgtggagaaaagcgcgacttgcaacgccctgcaagtcgtgctttttaggagcgatcaaggcgccggcgaacgccggcgccgaaagaaagcccgcgacaaaaggggccgaagcccctatgccccattctcggccggagccgtgtcgaaaagcctcatgcacagctcttcttcgaagaagcgaacgacctgctgcacgtcgctcaataccgagaagataaagaccggtttctcgcgcagctccctcagccaagccttcaggtaagctacgttctcggcccggatgccgctcgacacgcccaggccgaggccgaccagggccgccgagaactctgcgaccaactcctcgcggccgtaagccgccgtcgacggctcgcccaaatggcggtcgagacggcccgccgagccggtcgagtggctcatttcgtgcagcatggtcgagtagaaggcttccaggtcgtgaaactgctcttggcgcggcaggacgatcctatcgtcacagggagagtagaaggctgcatctcccgacttctggagaatcgggcagacccacgactgcgcggcaagcagccgctcaagtacggggtgcacgctccccgacggacgtggcgtcatcgactgacgctccaggagcttctgccactgttccgggaagcgctcctcgaaatccgtctgatcgaggttcagaaccggataatagcgtaaactgaagcgcagtacatactcggcgcgggcgctttcgggcaaggcgttgtattcctcgaccgtaagataccggcgctgaccgtcggtcggattattcgcctggtaaaaaggtttccagaataccaccgggaactgtttggagcccttcctgaccgtcaggccgcgttctttggcctgacgaaaggtcaggaataccggagtccggtaacccttgacttccgtaagcatgagcagcgtcaaaaggttcgtgccggcatacctcttacccgtgatgttgcagggaaggaggccctggccgtagaaccacggcttttgccacgtttgagtcatggattcgattttcaagaccagcagctcggcgatgtgcgtcgagaccttttcgagaacctgtgaatgtcccattgatttgttgcagactttatactcctgcgccggagctttacactgccgaaacactcggaacagcgatgcggctaccagccggtcgcggagactgcaccataggcaaggacacgcaaggaaatatttaccgacggcgcagccggagggcgctgcgcgcggatcaatatttccgcagcgtgcacgcgggcggcctcggcatgatgccgaggccgatccttgccgctgtcgccgcgacttcggctaactttgcgtcgtgttgtgagtgaggcgaccgctctcccccggccgccgagttcgcttgtcgagcgacggcggacgcgagcgggccgggcggcatcgtcgcccggccgcgcgagttcagggggctgcggccgggtcgccccgacggcaggcgaaggctgccgggcggccggctgccatagcggcgtagggactctttgtgatgaatcacaaagaataagacacgaacaaaaaaagtggggaaaattccccacctcgatcagtcgatgataataatgtccccgccaataccgagctcctgaagctcgcaaaccagtttaccgagatccttggctgcctgtttatccggatcggattcaggtgtattcttccagacctcgatgtctgcatcatagttgtcggtgcgctcgaccaattcgtcgattttatcgacaagttctgtaaagcaaacatcttcgacacgggttttggcatgccccatgtcgtcctgcagctcgacctcgaaatagtcggagcccggattatacagcacggcgacatatcctgtatgcttgaaaccttgcacccggaaacgcaacccctccatgccgtcctctttatagacggaaggctgatggtatccccaagacatgatgatctgaggagcggatttcaaaatcgacgtgatgtactgtgccatttcttccatgactttaatgcagactttatcctcctgcgccggagttctacgctgccgaaacgctcggaacagcgatgcggcgatcagccggtcacggagactgcaccataggcaagaacacgcaaggaaatatttaccgacggcgcagccggagggcgctgcgcgcggatcaatatttccgcagcgtgcacgcgggcggccgaggcatcatgccgaggccgatccttgccgctgtcgacgtgacttcggctaactttgcgtcgtgttgtgagtgaggcgaccgctctcccccggacgccgatttcgcttgtcgagcgacggcggacgcgagcgggccgagcggcatcgtcgcccggaggcgcgagttcagggggcgcatggccgcgcatggggatcacagatccgcgcggcgacatagccggggatccggcagtcggctatggccggttccgcttccacccgaatattattccccgtataataatatcagcatccgcaaactccgtgagaaccgcgccccaaggcgcggcgcgaaaaacaagcggcccggctggttagaaccagccgggccgcgatgttgatgggtgaagggaagaaattacaagagccatttctttcccttatctgtcttgctccaaattaatattgccactgcaaaagcaataataaaaataaaaatccaaaatgccgccatacttattcctcctgtgttttatttgtttctttctgccgaagtaaccccaagccaataaacaagcaactcaatgtcgccccgatccctccgacataaacaagccatcgcgaattctctatatcactaattaaggccccaacgacaactgccgttagaagatatttggcaatatccatgaaccatttacccaattcctttctcataggtgcaaatatagcaaatttttcaccgaaatagatagactttgaaaacatcgacggcgcaatggccgtcgatgttcgtaaggtcagacctgaaaattcgtgacccgataaatcacacgggcacggggcttgttctctttatccagccacgcttcgaccttatcataggcttccacgtagataaaacggcctttcttcagcagattgacgattccctcggctgagttctccggcttgacatagatttcgcaatccgcccactgggcttccttgatcgggttgccctgttcgtctttggcatccgtatcccgttctgcatacgccacgctgaacgatacgaatttgtgaccgccctgcccctcgcggcattcggcatccttaccgagattaccggtaatcgtgattctcttcatagaaatttgaacgattgacctatacatcgtgaggttctgcgaggcactgcacctctaatttacataaaatattttagttattaatgacaattccggtcgttttgtctatcaattgataatttgtgaaagccgcattatcgctgctttcaaatttcagataaacccaatcaacccatattatcgcatggttgtagcactcacacttctcagtcaagacgatcgttttattttgcgccgggtattttttcgtgagcgttacgcgcgcctgtatctcgtgtggtgcgtcggaagcgaaataatcgaaatataggagctgggtgccgttctcgtcatccagcgaaaaccaagacacataacacaagcctttgatccctgcgacataattgtagcgctcaagcgctttattcagccaagcatgggcggctttctcgtcggggaactccttttgtaataacacttggttacacatcttgtcggtgtaggttttcgtaagacagactgttgctaaataagttttcataattgtaaaattttaaaaggttaaatagtgtgctccgctggggcttcgctccccgccatccgccgatcacatcgagcggagctggttaatacgtcaaagaactttattgctgaaatctcgctaacatcctcgtcacgccctttatcctttcaatcaaacatatcattttctcgaaggtttaccgggctgtggtttcccagccgacggatgttttcaagatttcaaagaacgaggggtcatccccttacacgttgccttcagagcctttctgatactcgtatcgaacactgacattttgaaataaaaatggagcggccgcccgttcctctggaatgggcataggcggtcgctctctaccgctaaaccggcgcaagggttccgggaaatatttttgaaaaaatttcttcagcgtgccccggcctgccggggtaaattttttcatcataaacatagttcccgaaaggactcctaagaaaatatttcgcgggttcattgcccggcaaaatgcagtgttcgtactttgtatcagaatggtctgaaggcaacgtgtaagggatgagacccgtcaggtcgcagaaatcttgaattcagccggagtgcgaaaccacagcccggtcagacccagagagaaaataccgctctccctcgcaacgcgaggggtgctctgccgcgacgtggagaaacgaacgacttgcagggcgttgcaagtcgttcgttttaggagcgaccaatgccccgcctgcggggcatggtatgaaattacgagcaaaaaaagagagccggcgaaccggccctctacattaccttttggaaaataatgtcttcaacttgatctcggcggccacttccggacacacttttgccatacgtccaattttttgaatctgattttcgttaggcgtacatttacgcaaccaacgtacgatgtcatcggaatagttttccgtcacttcaaccagctggtcgattatttctgacaatttgcaggcagaaatatattcgaccgattcgacaacttcaccactctcatcgataagttcaatgtcgaaataaccatccaaagaattggggaaaatcacaacggctccctgatgtttgaacccactgaccttgagtataaaagccttccgaccagcaagggtgccaccagcaccgcaggtcacattccaactcatgagattcaacggtttttcagcgagaatcgacataattaaatctgatgtagacatagctttttgcagactttatcctcctgcgccggagttctacactgccgaaacactcggaacagcgatgcggccccagccgatcacggcgactgcccgaaggcaaggacacgcaaggaaatatttaccgacggctcggccggagggcgcaacgcgcggatcaatatttccgcaccgggcccacgggcggccggcctgaacaggacgggcgatccttgccgctgtcgccgcgatgtcggctacctttgcgtcgtgttgtgagtgagagtaccgctccccccggccgccgagttcgcttgtcgagcgacggcggacgcgagcgtgacgggcggcatggtcgcccggccgcgcgagttcagggggctgcggccgggtcgccgcgaacggcaggcgaagtctgccgggcgaccggctgcccaaccggcaaaggaattctttgtgatgaatcacaaactttccccttgcaggtgaacggaacagaccccccccggagtttctactccggggcaacaagttacggaagctcgtgaattgtgatgaaattctcagggcagaagcaacgccaggcattccgctcaaggtcgaaataatgcacacagtcgtttgtcgaacggctgcgggatttacttccggcccggtactcttccagcaagcagggcttcagtgtcccgaaagcctcccggagtgtcccgtcctgtttgcggcaactgaatctcacggcccggttacgcaactggatcaggagattatccagttcgtccgtttgctgtaacgcttcgttgactgcgttttcgacatccaaccgcaagggccagtgcggtaaattgtacttgccccgcagtttcttcgtgagaatccgaattaaacgctcgttatccataacttttttgcagactttatcctcctgcgccggagttctaatactgccgaaacactcggaacagcgatgcggctcaagccgatcacggcgactgcccgaaggcaaggacacagaaggaaatatttaccgacggcgcggccggagggcgaagcggatcaatatttccgcactgggcccacgggcggccggcctgaacaggacgggcgatccttgccgctgtcgacgcgatgtcggctaactttgcatcaatgttgtgagtgagaataccgctctcccccggccgccgagttcgcttgtcgagcgacggcggacgcgagccgtgacgggcggcaccgtcgcccggaggcgcgagttcagggggcgcatggccgcgcatggggatcacagatccgcgcggcgacatagccggggatccggcagccggctatggccggttccgcttccgcccgaatattattcccgtataataatatcagcatccgcaaactccgtgagaaccgcgcccccaaggcgcggcgcgaaaaacaagcggcccggctggttctaaccagccgggccgcgatgttgatgggtgaagggaagaaagcagctttagttcttcactatatatgcccaataatggagtttgtgtagttcattatccatttgaatattattgtaatataataatattcgatggtaagtacgaaaaaaggcacctcgaatattatccaaagcacctttacaaaacggaagaaccacagttcctacttgtctccagcacaaacactgttaatctactgctgtctcccttaccgcaaatataatcattatcgaacgaatcataccgaagaggtagcatataccgtaatattattataataccgatattatagtaatactcgtaatattataatatccggcacataggttgtacgcgacgggaacgagagtgcaaatattattgtaatatttatattagaataatattcaaaaacaatacagagctgattatctgcgcaatacaacagatattattatattataatactatctgtattacaatattatcctctaaaaaaataatcagcggattatttgcagaatagaaaacacaaagctacttttgcaatgaagggaagaaaaaacgcaccgtttatctggggctttttcttcaaaatatagtaagcgtcggagacttcggaaacgagtctccgatttttttgcaaaaatgttacctattcgaggaacacgaatctattttcttcccttcacgattcaacatcttttcccagccattttgtcaatatatcgagcaaaaaaaccttattcggcctcgcgcgcgcgtattacggtaacttaccgtagtaatgtttttgttgtataacaagttgaataaaatgtttaccaatgttgaatagtgaatttatcaaagataaattctttgataaatatatatatataaagtagaatttgcagaaatgttacgtattgtccccggaaatttgcaagaatgttacctgtttttttgcagaaatattacctattattccgcccaaaaatagttttttgcaaaaatgttacatattcccaacgccatacataggcatcggcatggccatatacgattcgttcaaactggcatattttttactgaatgacaggtttctatacatttgggctgccttgatctcaaaaatttcatcttcagacaaattactggccacaaaatcgagaaccatgcgatttgcaatatctactttcttcatattaaatgagatatagctttttgtcacgttttttttaccgtgaccaagagcagcagcgatcgtatcttccggaacatcgagaaccgaggccaacgtcgcccacgtgtcgcgcgcataatacgatcgcagaaaagggtagaggccggttttcgtttttttcccccaacgtgctttatcaacttcaaccctgccaaactccttcagatgcttgttcatcatcttcaggaacgatctgtaatcagcacgttcgtccatgaagcaaagcaaatatttctttcccctccagcggttgatgatctcttgggcttcgggttcaaccttgatcgaatagcgtttcttcgttttctgacgactgaactctattcgaccgcccaccatatcagtcggacgtaacagaagcagatcgccgatattaattccaatcaggtaaaaagagagcataaacacatccaaataccgctggcagaattcctcagcgggaaaatcccggataattcgcagatcctttaccggcagcgccagtttcacaggctcttccgatggcatttcgaattttttgaagggataccagttcgcttccgccacaccataggtcactgcatcattaaacagggttcgcaggtttcgcaaatgaaggtttacaccattgggagtcagtcttcgcacaccaggtatagcccgccccttggcatcgaggtgctgcgagaagaggaaacgctcaaagcccagcagccaagccttatcgacatctctgaaagacaactttcctttatcgtatgccaagattttcttcagcgtatgttcgtgtgtgccccgcgtcgatgcgtttgcgatgcggtcgatatattgctcgtaatagtcgatcaggtcaccccgcgccgagcaggacaccgtttgcgatgcaacaagatattgcttcacctcgcgggtcgacatattggcgagttggcctgaaacctccagcacggtcagttttttctcaagagacaacaactgctcctgaagggccatgttaaatagccttttcgatttgtgtttgacgattcggcacgtctgggaattccagttctccggagcaaggtagattttcacagggatctggaatacgatcgagcgtgtcgccgaaactgaaatttttaacggatacaattcgtcttttttgcgctgaaccctaagatccagaaatggttttaatgtagccataaattttttagcaaaaccagtagcaaaaccatttgcacaaaatagcacacttttgcacacttttctcctcttacagaacgcagggataaaaaagagaaaagcggctaaaaatacgttctacacgcatctctgaccgctttttgattagtgggagctgagggattcgaacccccgaccctctgcttgtaaggcagacgctctgaaccaactgagctaagctccccttttgctgaattgcgagtgcaaatgtatgataaataaatcattcctgcaagacctcgcttcattttgggaaatcttttttcgctggctgttcgttcggtttacacgctggtttacacatttgcataaagccaatgctggttaaacaatagtgaattagttgataatcttatatttgaataagagaggataaactttacaaaggggcctataaatatacccctttgcaaagtctgtcctcgtatctgttgagaaaacgcgtgggaaaattttcccctgctctctccttttaagagagtgtttgttgcttttgtatctatatgaactgctctaaatatttctcgttgaaacccgtgagtggaaatttgaaatctttctgtgtaccgtctattgccgtatagctgaatacgaccgtatcgctcttaatatgggcttcaaaaagattgagcatacagttggacttgggaatatctaccatgttaggtaatataatggcgagacaaccctcctctacggcttttggatttagcagataggagaatcctgccatataatgaccccgtctctgaaaacagatggtcatatctttcgtagggtcgatgtcgagttcaaagatatagtgaaattctcgtggcgtaggatcatcagttctacgtcctacgaacagacagacgccgtaaatattatcataagatacgcctttggcgatatacgatacttgaacatcgtcgatagtttctgtgcctgtttttcaatcaatacttggtgtttttcttttcattttagctaaaatttatgttgtgattaaatctttgattatgatgtaaatatagtaaaaatttatgaaatatgcaagtaatataaaaaggacaagctaataattagattttttagtttttaattattagcttgtccttcctatcaattttgcaacgagtttatataggaaacatatgaatcaaaattcgcaaacagctcttgtgttttcactgtgtcccgccgcgctaatatgtcgcacataaccagaatcaaatgaaactgaaaaagcataatgatatgttatatccgtgctatctgctgctgcccaatatgatccagataataaaggataaccaactttttgtaaactttgatttaatatattcttgttataatatacttgtaatagctcttcttttgatggcaatttccatgctgcacctaattgttcacaccattcttctacaccatctacccattccatccgccctgattcattaatcgatattgctttaccatgatgattctctgctaattcgtaaataataccattatttccatctatattgatgcagtatccaattttgagaatcccatttacagatgttatcggcattgttgtgttggaacagtaaaagtagtccagattaatatttttagatatgttaatttctgttattgaatttcctcggcaatccaaatatgttaatttttgattattgattacctctaattcattcaattgattgtcgtaacattttaaacttttcaattccgaacaattagatataagcaatgttggtaattgattgctatgacagtctaaatcatttagagataaacaattattgacgtcaaggttctttaattgattttcatagcaatttatcgtttgcaatgcaacattattgcttaaatcaagtgcagtcagattatttgcaaaacaatccaatgtttgcaatgctctattggtcgataaatccaatgcagaaagaatatttgagctgcaatcaacgtatttaatcgcataacatttattagtgtttagcgatgttaattgcgcattatccgtgcaattaagtgttatcagtgttggcagttcactcaaatcaactgctttcaaatatgcattacttgaaatatctgctttcgtccatttagcatatccaccgagaaccaatgattgcaaagaggaattttttacactaatagtcgattgcgatacgcaattagatgaactgcttatcaagtaaagggctgttaaattaccacaattcttaatattcaacgaggtcaataatcggcatgaatgacaatagagtttttcgagttttgtattattgctaacatccaacgcctttataacatttgatgcacaattataataggtcaaggcgggattcgtatttgtgtctattgctgtcaaactattcgtgttgcagtccaaataagatagattttccaatccgcctatttttaaatccacaagactgtttgagaagcatttaatctctgtaagttgcgtattttgtgtcaaatccaattcgaccacactattatttgagcagtccaacgttttaagattggcaaaatattctacgccttttaacgaataaatggatttaccattacatttgataaatgttattttaagggcctcttttgtgtctatttctttgtcgccgttagtatcaaaattggctgttaaataggctttgaatagcgggtcttcaaatgtaagcacatcggcaacatcacctttttgcacaatagttattgtttgggaaacattcttatccgcattttgaatcgtgatatacccagtacgggattgagagccatcgtttgatgctatattgaaattcaatgtccgctcagtcattgcacgggtgctgacatgagtaatccatgtgtcggtttctggaattgtgacaagtaaatccgtattgctttgtaaaaccacttgtaaggtctgctgttcataggtcaattcataatccgattcagacagaataattgcatccttttgtagttgtgtaatcgttactttgcatgaggtcgtaccatctacaccagccaatgtaatatcggcagaacgaccatcataagattcattttcagcaacagaaaaacgaatattctctccctgcgattgaatgctcaaccacgtttttgcatcttgtggaatctgaatagtataatctatattggctgtaacggcaacatccaacaagcctcctgcggcattgactgtataggtgtcttgcacggtggttatggtatttcctaccccttttaacgtaattgttttcatgtaggaattattctgggcatctgtcagaataatcagaatctttccatcacgaataggattaggtgcggtaatagcgattgttccagtcaattttgtttgctccgtaatctcgactttccaacctgcctgctcaaaggtttcgatagttaccgtttccgaggaagaggttatcgtataattcagcgttttcgtttctcctgctgaaatattgataagatcggaagaatcgaaacgtatagacaatgctacacttttagggattgtaataatcgtatcatcggctaatgtaaaataaacattttcatcatcttctgttacgcttttgaaaatgctactgccatctttgccgtctgttccatcctttccatcttctcctgtagccttgcctaattgcgtccagttcgttccgttgtcataggaaatccaccaataaccctctcggatttcgagtttaggagtaacgccgtctttgccattcgttccatcttctccacccgaaccgtctgcaccatctttaccgtccgtgccctctgctttaattttatttcctttatcatctttcagccagtcaccgttgagcgtccaataataaacgccatccgtgtcttgttttacaccgatggtaggtgttacgccatctttcccattagttccatcctcaccattaacaccatcttctccgtctttaccatctgtaccattataaatcgtaatagaattgctttttgcaaaagttatcgtatagccaataatttcaccatcattagttattggcgtaacactcgttatataatcgttattctgtaatgctgttatgatggtctgcaacgatgaaatattcgtattcatttgcttgcaacgttcttccaatattgtaagccgattttcgaggtcattcaaatcattacgcaatgcactatcatcatacttgtcgctacaacccaataacaacaagccacacatgagtaaggataatgtttttttcatacaattcgatttttagatacaagaatctgattataaatcttagaaccccattatgctactaaacgttttccagccgtcagctgtcttatatgccgaaagactttcggaggggactttaaggacacaattaggattcatttctccaaaggcttgttcagtacattttggaggtattaccgcgcctattattattgatgtcaaattaggattgttgctaaaagttttcttgccaattgattctaactgtgtacaagcagaggcatcaaatgttgtcaacttataaagttgtgcaaaagcactggatatatcgcttgatatatattgtaatttagatcctttttcgaaagatattgttgttaaattagagcatcccgaaaacatcggattatgaagtctctctatacttgcaggaatctctattgtcgttaaggatatacatttggcaaatgtcccgtaactatgccccattgcaaagctgttggctccgccttcattgagcgagttaagcattgacggtttttcaaaagtaatttgttgcaaatttgaacagccataaaatgcagcaacacctattgttgttacagttgatggaatttcaatagcagacaatgcaatacaattactgaatgcaccatgaggttcccaagaacatgccccgccaatctctttaagtttagaatttgattcaaaagaaacaacttgtagttgagtgcaattaaagaatgctgagaccccaataatttcgacagatgcgggaatctcgattgattttaatgcggtgcaatctgtaaatgcgccataatttatgtgttcataatgagtatcataaccacctttgattattttgagattagaatttctcccaaaagtaacgcttgtcagatttgtgcaacctttaaatgcggccgcttctattgtttccacatttgcaggaatttccacagatgttaatgcagagcaattagcaaaaactccataacaattaatattatatgaagtgtatccgccttttattatcgtgagttttgaaccttgttcaaatttgagttccgctaatcttgaacaatcttgaaaagccgattggtcaattgtttcaacatttgcaggaatcagaatcgaggttaaaaggctattataaaacgctttttctccaatcgttataagacctttcggcaatatgcatttttctatttttgaatttataaaggcttgagatggaatttcattaatattggaagctgaaatatcgaggtttcgcaattgggggagtcggtttcgaattaaataaaaatcgagttctcctaattcgcctgtaattgtcaatgattctattttggcataatcatagtccacaagaactgtttccaacattcctttttgggaaacatccactgtaatatttagaagctcttcaccagcctgataaatgatagctgtttccttgaattctccatagtaaaatgtgatttgtccctctcgctgttctctgctttcattttgtgcaacagtaaatgtcgctgtaccaccgtaggtgtctttgaacataacccattctttacaactgtcatcaatccgatattcaaagttaaaagttgttttaacttcaatatgagcttcaccacctgttgcatccatctctattttagatggagaaataataagctcaccatggcgttgtgttattgtaagggtttcatttgcagtcccgcaagaaaacaagaatgtcgtgctccgttctttcttttcattattttccattaccataaaggttacctcgtcccagtctttaccatcagattgggagggcgtacaccacggggcgccacctgtcaacgtccaatcacggctgctataaacataaatggattgcttttctctgctaatatcaaaagataatttgttttgactaagttcgatggtatcttcttttggattttgtttgtcgatttcatttccaccctcagagcaaccacaaatcatcagtacaaccagcgtaaataaggctatttttttcataatcgttattcgaaatgctaatatttgccaatttgaatatccacgaaatccgaccaaccaccattcatacttatttcggttacaggcagtccgaatatgttgcgcgattttgaaatcgtggtataatgttcttttaaacgatttccatagatagcaaccgaccctatatctcctgctccatcaggacaaaacataaacagatttacgggctggccttgattggatatttctatggccatacatcccgaactcaatagttccgatttgaggttcaccgttaaatgttgaaatgcaggacttgccttaatgttacgatgcaaattcgtaacgatagcttgacttcgctcattgagccgacagggtgggaacataattcatcatttatatacatccaacccccagatgtgattagtaaaaaaaagaaagcgcagggctgctgacttattttagtgcgacaggtcgtaggaaacccaatagataaaataagcaacaaccccacgcctgtatcgtgaagatacgacgggagggcaatgccacttattctctctattgtgcttggaatttcctacgttcgtcacacgagaataaagttacacttccgtaattcaatatgtctcccacaaaagtagaaaacaatcgtcggaaatgcaacggctttgcacctcttttttcgaggttgttgcagatacaaatttcgccaaaacaaaattgcaatccaacggcgatacgactggaaagtaaactttgttctttgcttattgggatagtaggctttgttctcggctttaagcctgcataagccctcaaaatgtacgttatatcagtcaaatacaaacgattattgagttcctgtctgcataaagttcatatttctacaagagtgatgacattacagaacacaatagtcgttattccagacacttatcgaacttattaagtatctatccgctttgttcttccgtaaaagagaatacccctgctgttgtgaaacagcaagggtatttcataatttattcctgattaataataacattatctgttgtacatatacgctttttaagttctttgtggaatacagtaatacgagctttaaaaaatgcaaaataatcgtttgtccatattccaaatttatctaaattaactattagatgagttttcattgtttcactcaaacattcattatgctttgcaaaagttctcatatattgacttggagcttttgctccaataactcttttatttaagtaatcatctacaattgtaatattagcaatatgatttgcataaaaatcttcgacaccatgcttagatagatacgccttaggaaaaaaatggtgatagtttttgctattagcttgttttaaccaatcattgctaattcttacaattgagttatcattaaatgattttggttgatgatatgcaaggatacataataatgattttatataactccgacttacactaaaccatccttggctttcaatatattgagtactaatgtctataacccagtcgtatgttggtagctgattgttaattattaaatcgattttctttatatcttgagctaattttgtttccactgatgatgaaaatcgaccagataatgcacatctccaaaaataatcttgcaaatattgttgcatatttccaattggcttttcagggtgctgataaaagaaataggcaaagggaactattaacgcattgtatggaagtaaatgactaactggaattcggtatgaatttcgaaaatactctattgctcgttcaatagcatcaattcccttatcccaacaggcaataaatttatttttatctaattttaatatttgcttccgtgtacattctttagacaataatatagatatggtttgcaaaaccgtaatatctggtatcgtatcataatttagaggtcgaatagaatctataaaattgttaaatttctctgataggtcaaaatctttttctgcatcaaaagttttagctaccataatttcgaataaggataaaggttgtccgctaacatttattcgagtaaaaacttcagttgcaacatctagagatgcatcttttagtgtaattattgaaaacaagtagcttcctattctgtttttatattcatctaattttgtatgatattttaaatcatattgtgaaagatgagcaagtccaccatatattaaatcagtaagtttaatatattgcccttccgttaggttctgaacatcgcatacaacaatttgctcgtcgtctaaagcctctagattaatgaatatatttgaataatcaactgtcaaatgttcttggtttatttgcgcacctcttaaactagcaaataaacttgttaaccgttgttggccatctaacacaaaattgacgaaatcaccattctctgggtttggaagaacaatgcctccaatattccgaatagagcgtaaacgctctttcgttttccaaaaaataaaagtacctattggatatccttttatgatactatctattaaattggcagatttttctatatcccatacaaaatctctttggaattggggaatttttattaatcctttttcaatatctcctattagcccagaaaaagtcacggtcagaggttcaggtagtgtcataatacgaataatttaaaatggtttattacaaatatacaaaaaccccgtcatacgactaatgcaatgacggggttttatcaaattattccacaaaccacctgtactcggcatccccctcgatgactctgccgatacccgtgataagttcggtagcgttcagcgaacggtcgaggaacgtgtcgatgtaactcgacttgttggctcccgtaaagaggttgtaaaccctccaaaggtcaatctctggattgtcccctcgcgagaagttctcgtcagcgtaatacgcctttgcgactgcgttgatatggcagtccgtaaactccatagcaggcaatgcctttcgctcggctgtgggcaggtattgatacaaccgtgtcttgccgataagctgggcgaactggtgttcggtaaggtgtcgttcctgcattgcggccatccgctttacatggcgttcggcatcgtattctcggaacaagcgcaaggtggcatcgaacaagtcctgcacgcccatcacccgcagttcgcttttgaatccgtccgtcgatacgcagaggttacagcacacgaggttcttgaacccgatgaagaccttgaatttctccacagtcttcttggaatagaggttctcgtggttgtaggctcttactcctccaatcgaaaggttcagtctgttccctgccacatcctcgtaaatcgtgggtatctcgaaacagaaagccatccgctcgtagtagatggtcttgtcggtttcgagaagctggttcacgggcttgtggatagcctctggaatccgtcccttgatgatatgggacacgactatatcgggagcgtcgattacctcctgcgggaacatacggtgtgcagcacccagcaccgtttcgataaaactctggtgggaaatggtcacctcgttgtccttgctgaatacgggaacgacgcaatcctctctcaaatgggctatatcgactggcttggtgttggcctcgataaaatggcggttatgccgtacacccaaaggaacgacaacacctgtcgttgcaggttgggcaggttgttcctctacggtcgttgccacctctgtggcagggttatcgaggaaaggactgtcggagttcagaccgacggcaaattcgggattaggctgaaacgctgggtacatggtggtagggagtttgaggttgaacactcggttgtgcaggctgtgccatattgcaccatttgaggatggcttgccccacagcaggcgtgatgaggaattcgggacggcctgtgaacagtcccgtgcggtctttggatgtggtggccttgtggttcatcgctatatccaaaaccgcggtgaactcgtaatccacgttgtcgcgctgtacggctttcaagcccaccttctctggaaccatcttaccgttcttgtccgaaagcacataatcctgcttgctgcgcatggtgcagatcacatgagcggaggatgtcagaatccgctggataaaggcgttctgacggggcgtgaccttggcccagttggcaaaggagttgccttgcaggttggcgtggaaatccagcagataatcccagcaatgggagatgctgtcgatgatgattacctcggctcctgcctgctcacagatgccgatggcctcaatgtaagtttcgggagcatagttttcgagggtgaggacttgataaccgcccagatgggcataaaggtctgccgaacagttctcggaatcaatgacagcgattttagaccagtcgcctgtcattccgtaagcgataaggagcgacgaataggtcttgccgctgcctgaagctcccgccagcgcaagccgcatcttggctgcacgacgcatggattgtctcaattgcataactctacaaattagatgattagtaaatgattaaactaatcataatcgttgcggcttttgtattcgttctgcaatttttctcgataatctaccataaaaaatccctccccgaatttcgttttccaaaccaaataggggggagggggttttacggagtatttgcaagcgggcaggatattagaaaataaatctgaacctctggtcgagtctgttctgtttagaatccatatttctcttctctttttttgaaggcttcacgtcctccttcaaggatttcagtaatatgctctcttattcccatactaaacagaacacctttggctgtttcttgtttagaaaatgtatgctctaaggctccgttaacatactcaaatcgacaagattcattattcctattttcatcttgtcctctttgatttgcaacaataatattctcactatcagcaccaacaacaatattgggattatgggtaacaatgattaactgcctattctcctttctctttctaataaactgcactaagtcattataaatagatcggttgtccaaattatcttctggttgatctattaagatagggcaattcgcttcgctaagttcaataagaagttttagaactgcaagattagctttacctggcgacattttagccatctcgtcaccaccaatgcttaattcccaataatcaaagaattcatctctaaataatgtctttatgctatctttaggttctttatacttacgataggtggcattcccttgaataattaaatcaaaaataagtttaatctcattaaagtgatttgtaaaatcaacatcaggtaaactattattatcccgttcagataatagatcaaattgactgaaatcagttgacctttgattgaaaaattctaaaaaattatttctaaatcgattataataaaatttaatagatcctgttaggcaaatatctgctatggatgccgcttttgcatttaacacttcaataattcgtctatattcagaataagcatcttcatatccttttaagaatttgcttttctcgttatctcttaattcctctaaggtcttaatttgatcttcaatgttacttatgcgcaatagtttggttctttcgcgtttaatctcctcttcaatagaaattatttgctcccgattttggagttttgccttaatgggggacagttgtgcctcaatctctttatttatttcatcaatcctagagctaaatttactttttctctgttctccaactgttttaagagattcgatttcttgttgaaatccaattattttagaactgattgccgaaaatatattattaaaatattgagttttggatatttctgtcgctacttttaatcgagaatttatgttcgctattaaagagtcaagccctgtaaaaacactatctaaacttgcatattcattagttatattagcttgtatagcctgtgttttatcactccttttagttaacgtattatactttatcaattctgcatctaccacagaattccccttcagaacctcaatagacgtatttaaatgggcaatttgattgttaatacctaaaacatccccaatatcttttttctgttgttttaatacatcaatctgatcttgaatcttaaaatattcatcaatagcattgtctctgacattatcaagctctttaactttttgtataaactcatcataatgtagcttgctttcattgtcctgtagaagaatatctcgaataaatttgcctaattcttttctggaattactttgtatattagaggtcaaattaataatatatgattgtgggatatatacaaattgtcggcttctcgccgtggtattatcgttatatttatattgcacattatcctcccattctacgataaaatcgaagctttccgtccctctaaaattatagctatcaactaccgtttgagaaatctccttttgttcttgtttgcaggcatatttataatctattgcatttgctatataatggagtaataaagattttcctgatgattttccaccaatgatagtatttaaatctggatttaaatatatcttttggggagtaaaatcagagtgccctgtgaattgtacggatttaataaccctatctagccttttattattggggttatctcgttgaatttttcgtctcaattctggttcaaagattacctgcctaagcccttcaaacgtagagcttgctttcaaccaagtaaaacaatgccctaattctttcggtgtagtattaattttattggcagcaaatcgatgtgcatcactgcaatgtaataatctactatttacaccttgcgcttttaatgaggctattcctttattggcctcttccgcagagggagaggcactaaaaataaaatgaacatcgttaataatcgtctttttatcagcaattgatccatcccatctaaattgttcccattcagttttgcctattgccttaaaatattttccatctagataagtattaggctcagctccttctcctaacaactctttaattttagaaatttcaaaatttatgttattaaatccgatttcgagcggattacaacttcctcgtttctctattggagttgaatcatagatgtgtttcccgaaatctaataatgattcttttgtaacaaccccaccccaagaataaccgtcagtatattcggaattaagatttgctttccctcgtaatccagcaagaaaatggcattctataacttcaacaggtaattgagagatgtccgcaaaaataatatgataattaatacgattaagtttatcattccctacaaattctttaatccgaacctcaatgacaggcagaatcaattcaatattttgcagtcttccttcttttttatattctagaacctttttgtagccatctagaaataaatagtcattaattcctataacttttatttcttggggtaaattctctagttctgataggaatttactccaaacctcgtctgtatcgccaccgtaatcagaacacaatgatgatggggtatgtatatgaagatcccattttttccattcagaacctctaagtctataagtttccataaacgtgaaataaaactctattacacaaatatatggatttttttaagacaaaaaagactaatagtatatttaattgcaataaatggtaagatgtattttattgattggctacgtaaggggcgtgtatctaaaactcaaaaccgctgaaattctctttgtcctgttctattacctcccgatactggccttgcatatcgagcacctttataaaataaggcaacgataccttttcgggcaggttcttgcatcgtttatcgagttggtaggttatgcttattggctctgttctcgataagcctattgcattatacttggtaagcagtacagacatagcccgtttatcccagttaggaatggcaacacctttcgccttgcagaaatcgcatagctccttataaatccctgcattggtctttttaacagaggaattgataaaacagcctgctgtcaattcatagccgttagaaataggctttataagccctaattgcagacactctttaatgagagctgttatcgtgtttctcgataaaccgatactctttgcaatctggctgttacttcattgaatggtatccgtattattaaggcagattgcctttaataagagcagaaaccctgcaatcttggcgggatagtttctcttaaagtaactgctatccaaaaagaaatagtctttaatagctggctttataaagtaggaatttcgctttataaatcctctgtctgcatcttctttaacggtagtctgcacggtcatataacctgcatctttcagccgtttgatgctccgtcgtatggttcgttcatccaatcccgtcagtaaggatagcttttcttctgttacatgggaaatgttcgtcttgtgattggagcaacatttaatggttgctcacacgtaaatatcgacgggtttactgttgcccgtctgaaagttcacgattgatttggggattacggtataattcatcgttagcaatggaattttgattgtttgtaaatataatctcttttaagtgcagtagttttcggaagcaggctacgccgtaatgttctttggcctgtttacggttatcgaatcacttgcggtctttgatatggtagtacatggtcgggacgactttaataggtagtgtataagtaggtaatgtatatataggacacttttgagcagtttgcataggacagatttgagcaactgtctattctgtcattcaaaaacctactatctctttaattggaatcttccacattttctgattctgaaatacattctttataggaaatcttcatttcacactcaaaaaatgtggtaacacaacgcaaagaaaaggcagacgaatctgccttaacaagaatgaacacaatttgtatcgagtggaagatagtatctcggaattgccctgcaaatatactaaatatttaatcaaaagtcaagtgatttgataaatatttttgagaaatattatgctggaaattttgtaccttagagttgaagagcacgttgcttttcatctaaaacaaactaactatgaaagagattgtaaaaaatgaaaaaattcaaagttggagcattccgcaagaggatttcaacgaggacatgattattaagggactcgtatctgccctatcaactaaaatttttcctaatgaacagggattagaagactggcgttactttgcgatagcgtcagatggagaggatttacgtagtggttgggaagattatatagttacattggcagatggtgttgatgtaattcttggcgaagatgtcgttaatgaggatgttgaacttaggagtatattgagttatgacattattgacgatgagtatgcagatgaatatgccgtgttggtagatggagaacgagtaatatatgattatttaaagccatctattaaatccactccaatagaaattgatgggaagccttttattaaaattgaagcaacttttcttgaatattcttttaaaaagtagtaataaaggggctacggaacaatccgtaacccctgttttcattcataacaagtgttgcatcgccgcgtcgatttggctattctcgaatgaatccaagtaaatctgtgtcgtggataggtctgaatgtcccagcgattcggaaatgatggcaatattcactcccgaacgcttcaaaaccgttgcgaacgtatgccgagcgacataggtagtcagatgttcgatgccgacccgttgtccgattttgcgtaaccagcgattcgtattcgtcagcaccttatgcgttcggtcatatctctgctgttccgtcctatgcacacgacggtcgagtatcggaaaaatataatcttcatccgtctgtccttgttgctggtatttgacaatgatattccgcatttcttccgtcagcagaaaattgataggcttgcccgttttcttccgaacgtattgcacccgtccgtcccgtacattcccgtatttcagcagggcgatgtctgcaaagttaatccccgcaccgaaatagctgaacacgaaaatatcacgcgccaatcgttcggagggatagccttgcgacaaatcgagtgcaataaccttgcgcacgtcctctttcgtgatggcccgtttcttcgtccgcgtatcgaatttgctgactttataggcatcgaacgggtaataatcccgtttcaccaactgcaattctaccgccttgttgaacacgctacgcaacgttcgaaagagttggctaatggtcgtatcaccgcaatcgctcgtccgtaaccaattctcataacgacgcaaccacacggtgtcaatatcgctgaacgggatttgcaaccgctgccccgtgaatttcagcaacgatgtacgggagtatttgtaaacacctgcattgccgagtttaccgccgcgtttcatgtcgtcaatcagtttatcgtacaattcgaccaccgtagcgcaacggacttggttatgaaaatgggacacgagcgtttccaccgtgtattcacgttgctgggaggtcatttcgacaatcaaatcgttgtattccgccgtttttgcggctatcagccgttcgatttgctccttgttgggacaattccgtttgggcttgcctttctcgaaatcccaaaacttttcgtgcagggaaaggccgagcgaaacgtatttgcgtttgcggtctttcgtaactcggagcattaaaggaaatgtgccgtctttgagcggcttggacttgtaacaaacaacctctacggtagctttcatcgcgtaaatctcggtttacacactggtttacacaaacgggcaaaaaacgtgtaaaccgaccacggaggcacacaaaagaaaaacgacctacattgctgtaagtcgttgattttcagttgtgggagctgagggattcgaacccccgaccctctgcttgtaaggcagacgctctgaaccagctgagctaagctcccgttaaaaatggcttgggactgcaaaggtaattcaattttcaggaactccaaatttttcagcaaaatttttcattctcttttcatcacctctttgcaggcgtttttgaaagaaccttacgcaaccctcgcgcatctgcgcctgaacaaggacttgaacctaggaccccatgattaacagtcatgtgctctaaccaactgagctattcaggcattcgaaactcgttgtttaaccgtttcggagtgcaaatatatagcaaaatttcattcccgcaaaattattacacgattttttcacaaaaaatgtacctttgcaaaaccgacatccatacgcaccatgacgatacgacgacatatctcactcataatcttggccctttgcgccttgacggcgccggcgcacgcccagttgattttcacccccgattcatgggacttcggcacgattcccgaaaccgagggccgcgtaagccacacgttcacgggcgagaaccgctccgacaaacccgtcgtgatcctcgacgtggtgaccacctgcggctgcacggtgcccgaattcaccaaacggccaatccgtccgggcgagaaaacgacaatcaaagtaacgttcgacccgaccaaccgccccggcgccttcaccaaagagctgggcgtctactcctccgagcggcgcaagatcgcaacgctcaccgtgcacggctccgtcactccgcgcaccaaaaccaccgaagagctctatccggtcgatgcgggcggcggtctgcggcttgcttcgacgctctgcaccttctcctatatccgcgagggacagcaggtccagtctgccatcggctgcatcaacacgtcgaaccgcccggtccgtctggaactgcatcccaaggagtcgagcggcctgctcgccgccgactacccgcgcgaactcgcccccggccagaccgccgaaatcaacctcatgtacctcaacccggagggcgccccccgctacggttcgctgcgcgacgcgctggaggtgcgggccgacggccgcggcaacggaacgctgatcgtggcccacggcatcggcatcgacaagtccccggccgacgcccgacggacgccgaaagtgcagataaccgaaaatattattaaatttggcccggtaaaacacaacgcgccccaacagcagcgcaccttcacgctcaccaacacgggcgacggcgagctgatcgtccgcgccgtggagacgggcggcaaggtcgcgacgacgctcacgccgggacagcgcatccctgccggcagttcgttcacggccaaggcgacgctcgaccccggcaggcaggaatacggcgtggtgaccgatttcgtgacgatcataaccaacgacctcacgcgcccgatgcggcggctgcgggcgacggcgatcgtcgaagactaaagatacgacaatgcggctttaccgcgcaggcggataaaagccggaaacccatttataaatgtacccgatacttgaaaaaagactcctcgcagagggcatctggctgatgaaagtcctcgcaccgcgcgtcgcacgctcggcccggccgggacagttcatcatcgtccgcgccgatgaacacggcgaacgcattccgctcacgatctccgacttcgacgccgaagagggcagcgtcaccatcgtaacgcaggccatcggcgcttcgacgcgcaaaatctgttcgctcgaagcgggcgaagcgttcgccgacttcgcaggcccgctcggccacccctccgaattcgtcgaaatgccgctcgacgaactccgcaagcggcattacctcttcgtcgcaggcggcgtgggcaccgccccggtctatcctcaggtcaaatggctcaaggaacacggcgtcaaggccgacgtgatcatcggcgccaagacccgcgacatgctcatttacaccgacgcgatgcgcgccgtggccgaaaacctccatatcgccaccgacgacggctccgaaggcttcaaagggcttgttacgcaggtgatcgacgaactgatcggaaagcagggcaggcattacgacgaatgcgtggccatcggtccgatgatcatgatgaagttcgtggccctcacgacgaagaaatacgcgctgaaaacgaccgtctcgctcaatgcactgatggtcgatggaacgggcatgtgcggggcctgccgcgtgacggtggcaggcaggacgcgcttcacatgcgtcgaaggccccgaattcgacggccacgaagtcgatttcgacgaagcgatgcgccgtcagggcatgtaccgcacgcaggaacagcgcgccgcggccatcgaagccgagcgtcaagccggacaccaatgtaaaataggactggacaaataaacgcacggcggagccggcacgccgctccgcctacacacccaaaagcatacgactacaatggcaaacaagataccgcgcgtccccgtgcgcgaacaagacccgaaagtacgtgcgaccaacttcgaggaggtctgctacggctacgacctcgaagaggcgacgctcgaagcgtcgcgctgcctgcaatgcaagaatccccgctgcgtagcggcctgcccggtcaatatccgcatcccggactttatcggagccttgcaccggggcgagttgcagcaagcggccgacatcatcgccgaagacagttcgctgccttcgatctgcggccgcgtctgcccgcaggaatcgcagtgcgaaggctcctgcattctgggcatcaagagcgaaccggtcgccatcggcaaactcgaacgtttcgtaggcgactggaaactcgaacacggcgccgcggcgcaccgcaccgcaccgcgcaacggccgcagggtcgccgtcatcggcagcggcccggcgggactggcctgcgccagcgaccttgcgaaaatgggttacggagtcaagatattcgaagccctgcacaaggtgggaggcgtactggtctacggcattcccgaattccgtctgcccaaacagcgcatcgtggcgcgcgagatcgccgaagtcgagcggctcggcgtggagatcgaaaccgatgtcatcgtgggccgcaccgtcaccgtcgattcgctgctcggcgaggaggggtacgacgccgtattcatcggctccggcgcgggacttccccgcttcatgggcattccgggcgagaacctcaacggcgtggtttcggccaacgaattcctgacgcgcgccaacctgatgcgcgcctacgacgacacgtacgacaccccgatctacgtcggcaagcgtgtggtcgtggtcggcggcggcaacgtggcgatggatgccgtgcgcacggccaaacggctgggcgccgaggcgacgatcgtctaccgccgcagcgaaaaggagcttccggcacgtgtcgaggaggtccatcacgccaagcaggagggcatctgcttccgcatgctcaccaaccccgcggaggtcctcggcgacgagcgcggctgggtcaccggcatccggtgcgtggagatggagctgggcgaacccgaccagagcggccgccgctcgcccgtagtgaagcccggctcagaattcgacatcgcctgcgacgtggtcatcatggcgctgggcacctcgcccaatcccctgctggccgccacgaccgcaggactggagaccgaccgccgcggctgcatcacggccgacgggcagggcgccacgtcgcgcgaaggggtcttcgcgggcggcgacgccgtaaccggcgccgcgaccgtcatcctcgccatgggcgcaggccgcacagcggcacgggccatcgacgaatacctcagaaagcgttaaacataaatatctcacaagcaatgaaaagcatcaagatcatggccgccgccatcgctttgtgcggcatgactgcctgcggcgacaacacgcccaaaacctttaccggcttcatcaccgatgcgtcgatgaacaccgtaaccgtcgagaacgccgaagggaccttcaccttctcgactatggacgccgacaagagcgaagccaacggcctgctgctcggcgccccggtcgtcgtggactacaaaggcaagctggaggacggcgccgcagccgctaaagtcgccaccgacccgacctatgccgaagccgtcggcaaatggaccatgcccgaccccatcaaccccgaaggcgtaatgggcatcgacatcctgatcgaaggtcaggcccagtcgatcaacatggccacgctgcgctacacctcgtgggagctgcagggcgaagccggcaaaatcctgctcaaaggccaaagcgtcggcaacggccagaccatcgacttcaccgagacgggtatcatcgccaaggacgccgacggcgtatacacgctgaccatcgagggcaacaagacggtttacaccaaagcgaccaaatagcaaggccgctttacgcagccaaagcatatccccggccccgaaaaggccggggatttttcacgcatcccgacgacggccgcaatttggcgaaccgatttaaattcttaaatttgtatccgccaattctacctaagccatgactaaattacttgcgggagccttcctgctcctcttttcttttgcggccgcggcccagacacccgaagactcggtcgctttcgccggcgcccgctggcagatcacgcccctcgcggcgggcgccgaatgccgccgcgcccagatcgacatgttcgattcgcggcagaccgtctcggtggtcgcctaccccgcccgtaatttcacgacggaaatcatacagctcgacggcaaagcatcccccacgagcgagctgggcaaagccgccggagccgacgccgccctgaacggcagctacttcaacatgaagacgctcgcccccgtaaccttcgtactgatcgacaagcagattctgggccggacgactcccggtgagacgatgcgcaccaacggcgtcatcgctttgcgcgacaaacgcggccgcaaaatggacattctccgctgcgacacgacccaatactcccgcatcgcccgccgttaccgctcggcgctggccgcaggtccgatgctggtccgcgacggccggagcgtcgaatacgactccgaagacagcttctacgcccgccgccatccccgcacgctgatcggcaaacgggccgacggcacggtcgtcatggccgtcatcgacggccgcttcaagggcgaagccgacggcgcaaccatcgccgaaacagcctacatcgcccgtcagctggggctcgtcgatgcgctgaacctcgacggcggcggttcctcgacgctctggacagcgcaggaaggcatcctcaaccacccctacgacaacaaacgtttcgaccacgaaggcgagcgcggcgttcccaactgcatcgtgatccgccgcaacaaatagcgccgggaaaccaccgcccctccggcgggaaacgcagcgccggggaacaaaaagccgggaaagcgccgattattatcggccggaaacacaataccgggaatataaagccggaaaggcaccgcccctccggcgggaaacgcagtgccggaaacacaaaccggacaaagccggtaaaaagacccgaaccggtccaaacagccggtctcaaaagccggaaaaacagccggtccaaacagccgataaaaaacgtgtccacgcgacaaagcccgccggctccgccgcggcacacgcccggatacgaaaaaagccccggaatttccggggcttttcatattcagtcctattgtcatttgccgacgatctcctcaacccgctccacgatcatggcgggcgtcacggcatgcagacaacggtaatctccgtaacggcacggtttatttccgaagaccgagcacgggcggcactccatatcggcctgcacgatgccgcgcggatcgcagccgtacccgaagaatcccagaccgggatgcgtcgcaccccataccgacaccacgggcgtcgccacgagtgaagccaaatgcatgaccagcgaatccatcgacaccacgcaatccagattggcgatcaggtcgatctcgcccgccatcttaacccgtccgaacagcgccgtgacattaggatgaaggcgctccatctcctgcgcgaattccgcctcggcacccccgccgctatggatgaaaacccggtcataacgcccggcaagcaggcgcaccgtctcgcgggccagcggttcgggataggtcttgccctgctgcgccgagaaaggggcgaaaccgatccacgtccccgtcttttcacccatcggactgggatgctcgcgccgcacggccggcttcggatcgtcgaacacgaatcccagtttccggaatacgtcgcaatagcggacgactgtatgtttcgcaggtttgacaccccggccgccgcgccggataaattcacccttctcgtcccggcccttcccgatggccgcgaagggaataccgtgcagccgcaaagccgtgcggaacgtcaccgaacgcagcacgccgtgcacgtcggccacggcatccgcccccagccgccgcgcttgggcggccagccgccatatgccgcacagcgaatggtgggcgcccttgacatcgacgtccagaaaaccgacgtcgaggtccgtgaaaaaggcccggaacagcggtcgcgtggcaaccgtgacctgcagatcgggatatgcccgcttcaaggcccgcagcgcatgcgcgagcatcgccacgtcccccatcgccgaggtccggtacacgatcagatgacgcggaagcttcttactttttctgaccataaagaaccgggttcaacgccggatcattatacattttcatctgtttgtaggtcttcatgtacttgcggcccgcctcgatgtcctcgatcagctcttcgatcgctttcgaaagatccgcctgctgcgccagcagcacgtcgagcttcttccggcacgccgcgcggtgggcgtcatccacatcggtacgctccgtctcgcaggccatgtggtaaatcttgagcgccagaatcgacagccggtcgatggcccacgccggggtctcggtattgagccgagcgccgggcaggggttctatctccctgtatttgtcgagcaggtacgaatcgacgtactccaccatgtccgtacgctcctgattggacttgtcgatgcgccgtttgatggccagcgcggccacagggtcgatctgcggatcacggatgatatcctcaagatgccactgcacggtgtcgatccagttcttgtgatagagcaggtgatcgatcgttcccggctcatagggattctcgacggggcggtccacatcgtcccagcggtgatactcttcgataacccggttgaaaatgcggtttgcgttttcggtaaacatagttcagcaatatattttaattgtaattttcgtgggaaaattatacctttgtccgtataagattaaacaaagataatgaatttttccaaaaatgcaatactgctcgctggaatcctcctgacggcattcggaagcctgcgggcgcaggtccgccagacccgcgaggagtatatcgaccgttacaaatccatcgccgtggcccacatggagcgttacggcatcccggccagcatcaccatggcgcagggcatcctcgaatccgactgcggcaacagccgtctctcgataatgtccaacaaccacttcggcatcaagtgcaaacgcaactggacgggcgaaaaagtctaccacgacgacgacgccaaaggcgagtgcttccgcagctatcccacggtcgaagcctcgtaccaagaccatgccgaattcctcgacacgcagccccgctacgactcgctgttcgcctactccccgaccgactacaaaagctgggcgcggggactgaaggccgccggctacgccacggcgcccgactatgcgcagcggctctgccgcatcatcgaggaggcccagctcttcctgctggaccagcccgacggcgagcggctctacgcttcgcgttcgggccgcaagatcaccgatcccgaaggctggttcaccgaccagaccagcatggagcgcccggccgacgcatcgtcggccgtcgatccggacaactaccgcgtgacaatcaacgcccacaacggctacaacgtctatgcgaccaacggcgtgcactacgtgctggccaaggagggcgacacgttcgagaacatcgggaagaaattccgcatttcggcacgcaatctgcgcaagttcaacgatctgaaggacaagaaggcccagccgatgccccacgaggtggtctacatcgagcgcaagaaaaaacgctgggagggcaacgcccacacccacacctgccgtcagggcgaaacggcctacgccgtggggcagtcgtacgccatccgcacccgctcgatcgagaagctcaacaagctcaggccgggcgacacgctcgaacagggccgccagatacgcataaagtaaaacacacgataccgtatggaaaccacaccgctaagaagcaagatcctcgatacgatcatccgcaaatcgacgctcaagcaacggattttcgacaacaccttctcggccttcaacgagctgaaggagacgctgctcgaaatggcctcggagctggacgacgagctggacggcaaactcgaccgccgcgtgcggctcgaataccgcgaccgcggcaagttcgaagcccagctgcaggtggccaacgacatcctgatattccagatgcacaccgacatcttcgaattcgccgccgaccacccgatctggcagaatccctatgtgcagggcgaccgcgaaaactcctactgcggcctgatcaacatctacaacttcctctccgactcgttcaagttcaaccgcaacgccgacgaaggctacctcatcggccgcatcttcatcaaccgcgaacgccgctacttcgtcgagggcaaacagcagacctcgatgcgggccgcggagttcggcaaaagcgaaatcggccatgacgcgctcatcgccatcctcgaagaggcgatctggttcgccctgaacttcgacctgctgatgccgccttacgaggacaacaagcgcgtgacggtcgatcagttcaacaccaagatggacaactcgaaattcgtcacgggcaagcggctcggctacgatttcgaagtggaggacatttaaaacggaatttacattgaaagcatcgttaattacgctccttgcggccgcactgctcggagcgggcatcgtacaggcccagaacgaatacgccgaaatcgcccgactgcggggcatgaaccagaccgtccgcggcatccgctcgatggccgacggcgagcactacaccacgctcgaaggcagcaacatcatccgccacagctacgccgcggcgggaccgggcgagcggatgctcccttcgtccgcggccaacctgacgatcaccgactactccttctcgcccgacgagcggcagatactgatcgcttcggggtcgaagccgatctaccgccactcctatacgaccagctattttctggctgcgggcaacagcctgacgcccgtactccgggaggccgaagccccgcgcgacgcttcgttctcgcccgacagcagactgatcgcctattcggaccgcaacgacctttacgtttacgacaccgccgcccggcagacgcgccgcatcaccgacgacggtgcgtggaattcggtcatcaacggcacgaccgactgggtttacgaggaggagttcggcttcacgaaagcctatgccttttcgcccgacagccgccgcatcgcctacctgcgcttcgacgaatctcaggtgccactgatggagatgatgcgcttcgacggcaagctctacaatcaggcctactcgttcaaataccccaaggccggcgaacgcaattcgacggtcgaagtgtgggtctgcgacctcgcgaccggcgccaaagagcgcatcgacacgggccgcgaaaccgaccagtacatcccccgcatcggctggacccccgacgggcggctctacttcttccggctcaaccgccgccagaacaccttcgaggtgattctctgcgagcctaacggcgcccagcggacgatctacgacgaacgttcgcagcagtacgtcgagcgcgtggacgactcctcgctcacgttcgtggacaaagaccgcttcctcgtacggcaggagagccacacgggatacatgcacctctacctctacagcatccgccggggtttcctcgcgcaggtgaccaagggcgactgggaggtgaccgacgtcgcgggcaccgacggcaagcgcgtgtggtacctctcgactgagacctcccccctgcgccgcaacctctacagcgtgcggctcgacggcacgcagaaacgccgcctgaccacgggcgaaggcttctatacgatcgcgccgagcgccgacatgaaatactacatatcgaccttctccaacgccgcgacccccaaccgggtcgagatctgcgacggcgagggcaacccggtccgcctgctggccgacagcaaggccctgcgcgatgagctggccgccgcgaaccgcccgcaaaaggagttcttcaccttcgccaccgagcgcggcgacacgctcaacgcctacatcgtcaagccccgcggcttcgacccttcgcaacgctaccccgtcctgctgacgcagtattcgggtcccggttcgcagtcggtgcgcgaccgctggtcgctcgactgggaggacgcgcgggccgacaagggctatatcgtggtctgcgccgacggacgcggcacgggtttccggggcgagaaattcaagaaacagacctacggacggctgggcgcgctcgaagtcgaggatcagctctcgctggcccgctacatggcggcgcagccctatgccgacccggcgcgcatcggcatctacggctggtcctacggcggattcatggccctgagctgcgcgctcaaagggcacggactgttcaaaatggcaatcgccgtggcgcccgtcacttcgtggcgctactacgactcgatctacaccgaaatctacaacaacctgccgcagtacaacgcttcgggttacgacgacaactcgccgctcaacttcgcccggatgctcgacgacaccaagacccgcctgctgatcatccacggcacggccgacgacaacgtccacttccagaacaccgtcgagatgacccgcgccctgaaccgctgcggcaagcagtacgacatgatggtctaccccgaccagaaccactcgatgcagccccacgacacggcgaacgtacggcagaaaatgatccgctacacgctggacaacctttaaaacgagacgatatggaacggatgctcttcatcgaaacacccgtcggaaaactcggcatcacggcttcggacgaagccgtcacccgcatcttcttcggccgcgaataccgcaaccggcgcagaccgcgcaacgccccggagacgtgtacgccggagacggccggtcccctgctcctgcaggcggcggccgagctggccgaatacttcgcaggaacgcgccgcgagttcaccctcccgctggcgcccgccggcactccattccagcaagccgtgtgggaggccctgaggacgatcccttatggcgagacccgcacctacggccagatcgcggcgcagatcggccgcccgacggcctgccgcgcggtaggcatggccaacaaccgcaacccgatcgccatcgtcgtcccctgccaccgcgtggtcggcagcacgggcgcactggtcggctatgccggaggtctgggcgtgaaaacccacctgctgaatctcgaaaaagcccacgaagactgacggcgcgacggccccggacaacggcaggcgaccggcctcaagaagcacacaagacggcctcggccggacaactgaaacggcggcaggcccgccggcattgcgctggcaaaaactcatccgcacgaaaagagggcggcatccgcagaagatgccgccctctttttccattcaccccgtcaaagcccgaacgcgaaagcgtttataccgtcgtatacggcgctgacgactcccagcagcaggacgcccgccatgcagagcgcaagactgatgcgggtatagcggtcgctgcggaacggcgcgacgggcgcatcgttcggagtgatatacatcgccttgaccaccagcaggtagtaatagagcgagatgaccgtattgatcagcgcgatgaacaccagcaggtggaagccgcctttgaacgccgcggcgaagacgaagaacttcgagaagaacccggcaaagggcggaatgcccgccagcgagaagagcgcgagggtcatcatcagcgccagcttgggattggtgcggtacagcccgttgtaatcttcgatcccgaccttgccgccgctatgctgctcgaccgtcgaaacgacaccgaaaaccgcgaggttcgcggccatgtaaaccagcacgtagaagaccagcgaagtcatgccgaaggcgctcccgccgatcacggccagcatgatgtaaccggcctgcgagatggacgagaaggcgaggaagcgtttcaggtccttctgccggatggcgaagaggttcgccaccgtgatcgacagcaccgtcacggcatagagcagcgtctgccactgcccgatcatcggcccgaagaccttcatcagcacggtcatcagcacgaacgccgccgagcctttcgacaccaccgacaggtaggaggtcaccgtcgtcggcgcgccctgataggtgtcggcggtccagaggtggaacgggaccagcgaaatcttgaaccccagccccgcgaagaagaagaccatggccatgatctgcagcggcgaacccgtaatgcgcgccgccatatcgtcgaaatagagcgtcccggtcgtcccgtagaagaacgagattccatagagcatcagcccgctggcgaagagggcgcagaggatgtacttcgcacccgcctcggccgaataacgcttgtacttgtcgaacgccaccagacaggccatcggcaccgaagccagctccatgccgataaagaaaagcaggaagttgcccgcgccgaccatcagatacatgcccagcagcgtcgagagggtcaggatgtagaactcgccctgcttgtgggccgtatccccgcggcgcagccacgcatcggcctgcaggaagacgatcagcgtcccgacggtcagcacgctcttgacgatggagtgcatcggcacgtactggaacatgcccccgaacacttcgcccggagtccccggaacgacattgaccgcgacctgcagcgcgagcagtccgcaggcgacggccgaaaaccggcggcgtccccgctcccccgcgatcaggtcatagagaaacagcaggacgatcaccgcgatgagcgtcacttcggcctgcatagaggtaaatatgttgctgtaatccataatcgcttaactcattaattgtgcaatgatgcccgtcacgctctcccggatcatgtcactcacccacagcggcgcgagacccatgccggcgatggcggcgacgagacagacgaccgacagccgctcgtcccacgtggcgtccgtcagtttgaggtggtgttcgtcggtgcaggtgccgtaaataattttccccaccacccgcaggatgtaaaccgccgtaatcacgatgctcgtgcaggcgatgatcgtcacgacgcggtggaacgtgtcgtcgttcatgaacgcgccgttgaagatggtcatctcggccacgaagccgctcagccccggcagtccgaggttcgcaagacccgcgatgacgtaccccaccgcaaggaagggcatgaccttcatcaggccgctcagctcgcggatgtcgcgcgtatgcgtacggccgtaaatcatgccgatcagggcgaagaagagagccgtcatcaggccgtggctcagcatctgcagaatcgctcccgttccggccgtggtgttcatcatcagaatggcgaagagcaccagcccgcagtgcgacaccgacgaataggcgttgatgtatttgaggtcggtctgcacgcaggccgccaaagccccgtagacgaccgagatcgtcgtcaggacgatgaatatccagctcagttcgtgcgccgcctcaggcatcaggtacatcgccacgcggaaacagccgtaaccgcccagcttcatcagcaccccggcatggagcatcgagaccgccgtcggagccgaggcatggccgtcgggactccacgtatggaacgggaacagcgcgcccagcacgccgaacccgacgaagaccagcggaaaccagacatactgctgcgcgagcggaatgctgtgcaactgcgcgatttccagaatattcatcgtcgtcgccccggcgccgaaatagatgcccagaatgccgatcagcagcagcgccgaaccgcccatgagcatcagcgtcagcttcatggcggcatactccttgcggccgctgccccagacgcctatcagcaggtacatcgggatcagcgccacctcgtagaacatgaacatcgtgaagaggtccaccgagataaagaacccgaaaacgccgacgctcagcaggcagaaccagaggaagtactccttgatctgcgtttgcatccgccacgaagcgaacgtacccgtaaatacgatgacggccgacagcagcagcatggcgaccgagatgccgtccacgcccaccgcatagtggatatcgagcggagcgtaccacacatggctcgcggtaaagagcatggcggccgtctcgcccgcttcgcgcaggccgaggtagcgcaccaccagcaccgccgccagcaacagcagcagcgaagagcccgccaccatcacggcacggatctgccgcgtcgatttcgacagccaaagtcccagcatcatcagcagcggaatggcgggaaacaaggataacatattcataataacttcaaattaacggattaacagcaggatgatcgtaaagcccagcgccccgccgaggaaccagatgcagtaacgctgcacgctgccgctctgcatgtcgcggatcgcgtacgccgcgccgccggccgcccttgctagcagattcataaagccgtccacgacgtggcggtcgaaccacgcgatcggggtcgaaacaaagcggaagatcaccttgtgggtgacgaactgataaacgtcgtcgatatagaaccggttataggccgccctgtgcaggccgcggaaccgcagggccagccggtcggcaacgggctgccgctcgcgcaggtacatccacgtggccagcgcaatgcccgcggcagccacgcaaaggctcacgcccgccacacgccagtcgatatggatggtgtagggcatgccgtcgctgctgacgaactttccgaacgggatcgcgcccccgacgagcgtcaccgccgccagaaacaccagcggcagggtcatcgtcagcggagcctcatgcggcctgtgcgcggcatgcagctcccggttctcgcgcccccagaagatattgtagtacaggcggaacatgtagaacgccgtcagtccggcgacggcggtcatcagccaccccatcgcggggctgaatgcgaagcaggccgtcagaatctcgtccttcgagaagaaaccgctcaggggccagatgccggcaatggcgagacaggcgacgaggaacgtggcgtgcgtcacgggcatatacctgcgcaggccgcccatggccgacatttcgttggagtggacggcgtggatgatacatccggcgccgaggaacagcagggccttgaacatggcgtgcgtgaagaggtggaacatcgaagccatgtaccccagcccgcccgcatgcggatcggccgaggtgcagacgcccagcgccacgatcataaaaccgatctgcgaaatggtgctgaacgccagcacgcgcttgatatcgctttggacgcaggccaccacggcggcgtacagcgccgtaaaggcaccgatgtaggccgtccagtggagcacttcgggcgcatagccgataaagagcgggaacatgcgcgccacgaggtagacgcccgccacgaccatcgtcgcggcgtggatcagcgccgacacgggcgtcgggccttccatggcgtcgggcagccagatgtggagcgggaacatggcgctcttgcccgcgccgccgatgaacatcagccccagcgccagcgggatcatcgtcccggcggcggccagcagccgcacctccggcgtaaaggagaacgtcccggcgtaatagccgtagaagaggattccgacgaggaatcccagatcggcgaagcgcgtcacgataaaggccttcttcgacgcggcgacggcctccttcttcgtatagtagaagccgatcagcagataagagctgacgcccaccagctcccagaacaggtacatctggaaaatattggtcgccaccacaagtcccatcatactcatcgtaaacagcgacaggaacgcatagtaacgctggaaaccccgttcacccttcatgtagcccagcgagtagacatgcaccatcagcgagacggtcgagatcaccacgagcatcatcaccgaaatcgggtccagcaggatgcccatgtcgatatgcagcgtacggctgatcggcagccagaccgtattccacggaatcagcgtcgggaacgccccggcggcatcgcgcccggccatgaagtattcgaacgccgtgcagcagctcagcagcatcaccacccccagcaccgccgtgccgacgaggcccgccgccacgggcttgagcttcatgccggccaagcctaagaagaggaagctcagcaggggcagcagcagaatcagaatcgtatattccataagagtcgtttttcgttttcggctaccacttcatctcccgcaggctcttgacctcgatattgcggatgttgcggtaaatattgatgataatggcgatggcgacggccgtctccgcggcgctgatcccgatggcgaacagcgtaaagaagaacccttccagttgttccgggaagaggaaccggttgaagacgacgaagttgatatcgaccgaattgaggatcagctcgacggaaatcagcatcgccagcaggttgcggcgcgtgacaaatccgtaaattcccacgaacatcatgatcgtggagaggacgagataatattccatgtgtatcatagccgtacttttttagcgtttgcgtgcgatgaggattccgccgactatgcaggccagcagcaggatgctgatgacctcgaacggcagcacgtagccgtatttgccgctgctcatcagcgcatggccgatggtctgcacgtgcagttcgccgtgaacgaaatgcgaaggcctgaaatcgtgtccgagcgtcacataaaggcagacgccgagactcagcagcgtcgcggccagccccacgaagagtttatatccccgcaggtcctccgacttgtcgccctgactcgacgtcaaaagaatcgaaaagacgtacagcaccgtgatgccgccggcatagatcagcagctgcaccgcgccgaggaacgaatagttgagctggaaatagatgcccgccgtaccgaacagcacgaacagcaggtaggtcgccgcgcgcaggatgcgcttggtcgtcacagccagcagagcgctcacggccgtgaagaccgccagcaccgtaaagacgattaattcgagtgttatctccatggcttactgtttattcagggttttgaccagcttttcgcgcgtgtagaccgcatgttcgaagtcggtcgagaaacggatcgccccggtcgggcaggcattgacgcacagacggcagaacatgcacgcccccagatcgtactcgtagagcaccagccgcttgcggctcttgcccgtttcgggatcggcgaccacttcggtcgtgatgcggatggtgccgttgggacacgccgactgacacaggccgcaggcgatacacttgttccggccctcggcgtcgtgcggcatggtcagttcgccgcagaagcggtcgaacatcctgagcgtggcgcggttctccggatactgctcggtgaccttgggcgtgaaaaactcacggcccgtcaccttgagtcccgtcaacagggaccccagtccgtgaaagaatcctttgatatagcttttcatggctaaaaatgcagtttaaatacgacgacaacgaccatcagcagcaggttggccagtccgatcggcaccagatacttccattcgagcgtcagtatctggtcgatacgcaggcgcgggaatgtccacttgatccacatcagcagccacaccacgaagaacgccttgccgaagaaccagacgaagcccggaatgtagtccatcgcggcgttgaagccctcccagccagagatatgcagcggcatccaccctccgaggaagatcgtggcggccacgcccgcgacgatgaacagattgacgaattcggcgacgtagaagagtccgaagtgcatgcccgaatattcggtgtgataccccgccgtcagctccgactcggcttccggcaggtcgaacgggccgcggttcacctcggcgttgcccgcgatcaggtagatcacgaaggcgatcagcgccggaatatggcccttgaagataaaccagccgtcggcctgccgggccacgatttcggagaactgcatggtgtcggtcagcacgatgatcgtcaggatcgaaaggccgatcgaaagctcgtacgaaatcatctgcgcgccgctccgcatggcgccgatgagcgaatacttgttgttggaactccatcccgccagcaggatgccgaccacgccgatcgacgacgcggccatcatgaagaagacgcccacgttgaagtccagcacctccagccccttgttcacgggcaggcaggcgaacgccagcaccgacgccagaatgacgatgtagggcgcgaggttgtagaggaacttgtccgaacggcggatggtgataatctccttggtgagcattttgaatacgtcgcagatgacctgcaacgtgccccacggccccacgcgcaccggccccagacggcactggaaggccgcgcagaccttgcgctccatgaagatcatcaggatggcgatcaccgtatacatcagcagcaggcatacgccgacgatcacgcactccagaaagaccgccagtccgaggggcatcagcgacgtgagcagcccgtgaatccagctcgttactatactaaaatcaaacatatctgtaagtttttcctttttcaatccgttttccgctctccccggctgcaattcacggtctctggccgtgcttacaagtctgcccctctcctaaatcccctcatcgaaggggacttatccgcctgcggcggaaaaaacatcgggaaaagccggcgccgaccggcgaagctttcaaccgctcaccggtctatatcgggtacgacgtaatcgagcgtgcctccgatggcgatcaggtcggcgatcttcgtccccttcgctatggtttcgagacacgacaccagcggcagtcccgtcgaacggaacttcatgcggtaaggcgacttgtcgccccggctctcgataaacacgccgaattcgccgcggctcccctcgacggcggcgtagtagctgccttcgggaatgcggatcaccggcttcatcttcaactggtattccccttcgggaatattgtcgatcagctgttcgacgatgttcatgctctgctcgatctcgcgcatgcggaccatgtagcgggcgaagcagtcgccctcggtgaagagcacctcctcgaaaccgaccttgccgtacatggcgtagggatgccgcttgcgcacgtcgcaggcccagccggcggcgcgtcccgtgccgcccgtggcgccgaacgagatcgcatcctcacgggtcagcacgcccgttcccttcaggcgttcctgcgcgatgacgttgcccgtgaatatttcgtggtattcgcgcagcagcggacgcatataggcgatgaactccttgaccttacgcacgaattcgggatggatgtcggcctgcacgccgccgatggtgttgtaggtctgtatcaggcggcctcccgtggtctgctccagaatgtcgagcaccttctcacggtcgcggaacccgtagaagaacgccgtcaaagcccccatgtccatacagagacacgcgaagaacagcaggtgcgaatcgatgcgctgcagctcgtccatgatcgtgcggatatactgcacccgctccgacacctcgacgcccagccccttctcgatgcacatacagagcgcatggcggttctgcgcggcccccagataatccagccggtccgtaagggccagcgtctggggataggtcagcccctcgcacaacttctcgatgccgcggtggatataaccgcagtgcacgtcgagcttcttgatgatctcgccctccagcgacactcggaagcgcagcacgccgtgcgtcgcagggtgctggggaccgacgttgatgacgtattcgtcctcttcgaagagcacgttgcgcttgcggatgaaactgccgtcggaggtcagctcgaaactcggagcgctgtccatcgacacctcgttggtcatgcgcagcggattgagcgccggatcgtaatccttgcgcaggggataccccacccagtcgtcgcgcaggaacagccgccgcatgtcgggatggttcagaaacccgatgccgaaatagtcgaacacctcgcgttcgttcagctcggcggccttccacaaatcgcagaccgagggcaggccgcatttctcgcggctcggcgtcagcgtccgcaggacgacgttttcgcccgtggcagaggcttcgaggtgatagacggctccgaagccctcttcgccccagtccatgcccgtcagactgcgcaggaaatcgaatccctcggccctgagccgggcggccagatcgtgaaacttctccgcgggcacggtccacatgccgtcgcccgcctcggaccatacggcctgaggttcccatgccgttatcttgtctttcagcgtcatactcattgcttttctcctccttccacattcaaatcgttccgctccgaagtcaggtcgcggcgcagcagctcttcatactcttcgcggccgatctgcttgttcaccccgccgaagaaacgctgcaacttcactttgcgctgcagctgcatcagtccgtaaagcatcgcttcgggccgcggcggacagccgggtatatagacatcgacgggcagaatcctgtccacgccgttcagcacatgatacgacttcttgaaaggcccgccgctgatggcgcagccgcccacggcgatcacatacttcggatcggccatctggtcgtaaaggcgcctgagcaccggggccattttgtgggtgatggtgccggcgaccatgatgaagtcggcctgacgcggcgaggcgcgggccacttcgaacccgaaccgggcgaaatcgtaacgcgccgcgcccacggccatgaactcgatgccgcagcagctcgtggcgaaggtcagcggccacaggctgttgctgcggccccactcgatcagctcgtccagacagcccacgatcacgttcgtattgttgtcgcgcagttcggcgaccatcttttcgaggtattcgttgtcgttgaaatcttcgtatttcatcgacttgatcttcggttctctctttatttccattccaaagctcctttccgccatgcgtaggcaaggcccaaaatcaggacgaccaaaaagaagaggatgctcaccagtccgtatacgcccagctcctgcacgacgacggcccacgaaaagaggaacaccgtctcgacgtcgaacatcaggaacaggatcgcaaagaggtagtaacccaccttgaactgcatccacgaccggccccgcgtcgggatgccgcactcatatgcttcgcccttctgggggttgtacgaacgcggcgacacggcgcgggcgatacccagcgcgactgcgaccagcgcaatggccgtcaggatgacgaccaccaatagcgtgaaatacataacctgttattttacgaatttatattccggaacacgaaaaacgggcatgccccggcggacggaacgtcccgaccggaaaacatgcggctcgcagcgaaggggaaccggggctaaatcagaatccgccccagagaaaagatgtagtaatcgaccggcttggaatagcgcgcgccgcggtccgagagcgccgagttttgctgcgcaacggcttccgccgcagccgaacgggcatagaaacgatgccgcacgatggccttatgctccgaagagtgggccggaatctcgatcgaagcgtcgcccgaaagcatcacggcggccgtgaaataattctgcgccgtaacgggtgcgtggagtgcggcctgcggactcaatccgggctgtacccggcatgcgccgccctgcgacgtcgcaccgtcgagactccccgccagcacgaagagcagcacgaacagcacatattgaattctctccagcattatcgacaaaatgatttcagcgcagcgaatatacgccctttcccgctgaaaagctacctttcggacgaaaaaatgcacaaaatgaaaaattttagctacaaaagtgtcaacgacctgattgccggacgacgggtctccgccggcaaaagtcaagaccgaaaaaaaagcttcccgcatctctgcgggaagcctccgtcaacattcaaaccggattccggttattcgttccggccgtagatatacatctccgtgatatcgggtccataagcgctgcccttcgtgccgacccacttgatatagcgggcattgcagggcttgagcagctgaacgtagttggttgcgccgtagcctctgttgggagcctcggcctgccggagctctccgtgcggcgtccagttctccccgtcttccgacgtcgaaagctcgaagtactcgcccatgtagccgatacttccgtaagcctgaatatcaaaaccggcgacccactgcgaggtcttcatatcgattgtaatctcaagcggattagcgccatagacatcggtactcgtactgccatcccaaagtgcggcatctccgccccatacagagccgttggtatcaaaggtccatccgctcgtcgggtacttcatccacgacgcatcggccgcggacaggaaagccagaagatcggacttcttcacgatcgaaatcgcaacgccggcatcctccggatcgacaacggccccagcggtatcgccgaccagctcggccgtgagctgtaccgggaaagtgccgagttcttcgttcgcttcgagaaagtcgtccgtcaccgaccacgtcgtcgcgtccgactctttcgccccggccggaatcgtcacttcggcagcgggcgtaaaatgctcgtcgccggcaaatccttcgggaatgcccgccgatttcacgacgaacttcgtatcctccagtacgggacggtccaccacgaccttcacgtcatatgttatcggatcttcgttgacgatcgcaccgtcgatgaagttgcgcttgaaagtcacggcattgcccccgacgcccacgagcgacgcgacagcgacataggcagccttttcgatcaccatcttcgcctcgccgtccacaacgggaacctgcgaaccgcgcgcctcgaccacacgcacgcccaattcataggtcatcgggtcgaacacattctccatgaagccgtagttctcctccatgatcttcacctcaaccgtggccgtagtgctgccggcgggaatcaccagctcgcgcgcgctgatctcgaccagttcggcaggtacattggtgataataggttctacgcgaacgaccgtctcttcggggcttgcctgcgcaagggcaatggtatattcgcccgaaagcgaaccggcgagattcagcacgccatcattatcgtaggttccctcgaaagtcgctacccggtccgaggtcccggagatcgttgcgccgaccggcgtttcggggtaacccgccagatcgacctcctcgtcggcgcggcagccggtgaagagcgctgcgccgcccgcgagggcgaaaaccagcgcatatttaaacatgtttttcatcgtttactgtttttcggttaattccgccttgcaggcggggtcgccccgcctgcaaggcggaatcgaatcaatagtttggccactcaggctgtgccggacgcgaataggtatccggcaggtcctcaggataattatagcgcgtggtgtcggcgaacttgtagaagtgctccggctccttgagcggcgaaccgtagagagtttcgggacccttgttcagccggttgacgaaaatattgcgccaagcattcttgtccaccctgccgttggtattcttcagcggatcgggtgcgaagcccatgaaccagcccttgccggtggtcgggttgagcataccctcggcaacgccgctggtgaagttgccgcccgtaccgcggttgaactccatcgagatggccgagcactgcttctgggtcatgttgcccttgggcgaggtggactgaccgtaatcgcccacggcgatgtcgacccactccgcaatgtcctgcccttcgatctcggtcggccaactgctgatatggaacgaagagtagcagtaggctacgaccagtttgtcgggcatcgccttcttcgattcgtaggcaagacgggccgcacgcgccgaactgcgcgaagcatagtagggattcgaaagatcgggactgttcgaatactcgtcgtcgaagcatacgccgtcgatattgtatgcttcgcagaacgtggcgagttccttggcgaacatctggcatccgtagtcggaaagctgggctacacccgactggtcgtggttgcccagtacgcacatgatgaccttgatgccgcgtttgcgcagcggctgaatgaagacctcgttgttatccatccagtactgggtctgcggattgaggctcaggaacggagcgttgcggtccgcatggtggttgatgttgcccgaaaagagacagaccacatcccacagcaggcgtccgtcttcgagttcgaacgtcagggcgttgagcggattgacgtcgttgacctcgaagaacaggaagcccttcggcaggtcgtcgcccttatagcaggtaggcatcgaggtcatatccttcaccacgtagaaacaatggctctccttgaggatcacgccatcggcttcgagggctacggggatcagatatccccggcctgctacgagtccttcggcagcatggacggtcatcccgaccgtaagttcgacattgcggcctgcggcggcaaagaggccgtcgttggcaaaagtcaccttgtcggccggataaagcgtatagttcgtgccgttggccttgttgtactgtccgacgtcataggagtcatcgaccttggcgcgggccgtaaatccctcggaaggggttttggtcagcaccagacgcaggtcggcagtgtaggtctccttccacaattcgacggtggtgttcgacttcccggaattgaggtcctgcagcatggcgcccgtttcattgaggcccgtttcgatcgagccggcgccatcccattcgccgaccgtgacgtcgtccgtgcaggatacgagcgcagcggaacacagcagggccgcggctgcggcaagaataccggatttgaaatatctcgttttcatgcgtaatagctgttattggttattttatttcaggaagagttacgggaatccaagtcggcgtgccgcccacggcagagagattcgtgccgttcgcatggtcgatgatcgtcgaaccggaaccctcgttgaatttccagtaggctaccagcccttcgctttcggggctgacaccgtacatgttgccggcgatctgctccggcgtgcgggcaacgctccaaacgcgcagctcggaaatctctccggggatgtaacgctcctcgttgtacgacttgccgacataacagttgccggtcagcgtaaccgatccgctcatcttctgattggagtaggccacctgtttgccgttctggtagtagatgcgctcgccgtttacggcgtcccaaaccacggcgatatgcacccactcgttgaccggaagccccggagcggcattggctgcgggccagttgccgccgttggccgatcccgtggccagctggagctggtcgcgcggacggtcggcatcgccgatacgcacgaggaagttgccttcgataccgaataccgagctgagggcgtcaccgcggccgtcggtccagtcggcgctgcgcagcagggcctcgatagtgacctgcttcatgccgctgacgagcggtttggcgtcggccgaccagctgaccgggaagttcatccacgcgatgttggccaccacgttgatcatcgcaccctgacgggccacgaagtagaccgtactgcgactgtcgagcagatccacgccattgcacgaagttaccgtcacgggcagcacgtaacgacggctgccgtcgagggtgttgatatccttgaacacgatctctatcgcgtcgccgctcacctgaccggccgcaatgtcgatccggttggaagagagttcgtagcattcggcgggaagcgccacggcattgtcgccgtagatcatgttgtaggcggcgacctgcgacggatcggcctcgatcgtcacggcgacctgctgtccggcaggcttggccagacgcgattcgatcgtcttggtataacccggcgtatcgctcttgatcagcagatcgtcggagaggatggccgaagtgatatagaacttgttgtcgaaacgatgcttctcgacatcctcgttcttacagccggtgaaaacgactgcggcgagtgccgagagaaccaataagcatttattgtatttcatggctgtcagtttttagatggaggggttcataatgccgatcgcctcgcgggtcttggcccacaccttggcggggttgtaatagtcgtactggacatcctcgatcagcagccccgcacgggtatggcccggcgaggggagcgtcacccatccggcccaagcctcgatcgcctcgaccgtatcgccgaaggcatcgaccatgccggtataaccgaactccttcttgtcgtcgccgggacgggtggtctgggccgtcacgatcagacggtcggccggcacgccggcaacgctgactgcggtaagagccgagaacgacatttcgtcgagcgtcttcacgtcattggtcggcaggatgatgtaggcgcactcgtccagcaacggcatattcgcctccgtaacggctccggtgaagccgcggaagacgagcgcatgcgagggatgagcctcgtgccaagcgcggatcggcgcgaagagcgcttcctgacgggccgtatagacagccagcgcctcgtcctgcatgctgcctacggccttgcccgtataggtgaagatgaagccgtcgtagccccagcggtcgaccagtgcgatctgctcgccgacacggccgccgagataagccagcgcatcgtcctcgctgagcgtggggtcctccttcagcacctgcgtccagtcgttttcgaatgtctgcaggtcgatattgaagaggatgcgggttcccttctcatgcactttccggatttcatcgacaagcgtctggcaaaggacggacggaaccggattcacgacgatgaaatcgacgctgtcgggcattgccgtgaagtgctgcgtacgatgggtcgtcgcggcgccgttttcgggaacggtcatcgtaacgaacaccgccttgtgcgaaccggccttgtactcccggagcgcctgcatgtaccgggcatacaattcgggattcgtctcctcgaatgacgaatagttcacgtcgatcgcctcaggctcgacggcctcgtggcagccgaccatgaaaagcacggctgcaagaggcagaaaatatcttttgatgttgattttcatagtttgacggttttataggttagcgaatccggggattgcaatcccaccacagacgggtggacattttgtcctgaccgcccagccactgatccacggcggcccggatcgtttcgccgttcgcctcgtactcctccagcggataggtcatacggcgggcgcccagctgcagattcgtgatgtcgggattgttattgaccaccaccgggaacagacgcggatagcctgtacggcggtaatcggcccacgcttcggtacccagcgggaaattggcgatccacttctgggtgatgatgcgttcgaggttctcttcgaaagccgccccgtcgttccaagggatcgtgaccgtcgactggttcgaacagctgtaaccgaatgccgggtcgtcatagccgccgggaagcgccgtcgaagccatataggcagtcaactgatccgcgacgccacaacgctcgaacgagagccggataccctcctcgtagaaggtccgggcgttgccgcccatcgcccagccgcgcaaagcgccctcggcgcgcaggaaggccacctccgaagcgttcatccacatcagcgacgtcgatgccgtcacgttataccgcgagaagttgttgatacgatcatcgtcgggaatctggatgccgttgcgaagaccgtcatagccgcctccgctgaaagccgactcgttgaaatagctcgcacgacggggatcgtcgtaaccgttcatgaacgacgcgatatcggcggcgacgcggtggtcgcccgcacccgacttatagctgaagaagcagacgtagaaaggattgccgtccttgccgaagcccgtatacatggcattgccggagttgtcctcgatcacgcccagctccgagctgacggcctcctcggccagctgctgcggagtacgaccgtcatcggtggtgaaatccgtatagacgatacgcatcgcaagacgcaacttgagcgagttggccagacggccccagcgctccagactgccgccgtaaagccggtcggcatcggtggtgatcatgcctgcacggttgcgcgtaagcacctcgacggcagcatccagatcagcgaacatggccttgaagacctctttctccgagtccagcggcaccggatcggcgcccgtacccacctgcgtatagggaatcggtccgtaggtgtcggcgacgcggtgtacgccggcgaccttcaccaccttcgccacggcgatggcattctcgtcttcggtcaccttgcacaactccgtgaagttcgacatttcattggtgtagataacccggtaaaataccggcgaccagttcgactgcgggtcgtaggtcgagaattttccggtgttgaatccgctgttcgcatcggcgatataaccgccgtaaggcccgcccagcagcagatcggtgaactggcactgattgacgtcggccggaatgacccagctctgcatggtggtcatgaacgaccgcatggcgtaaccgtcccgctccatatcctctgcggtaacctcatagggattccggttgatatcttcgtagttggccgtgcaggatgccgcgccgagcgctgccgccgcaagggccaccgtcatattcgatatattgaatttcatggcgttttagcttgattagaatttgacacgcacgttgaagccgatgctgcgcaacgaaggcatcatgaaatagtcgatgccctgatagtagttgctggtggtagcgaccgcctctggatcaaagggcgccttgttgtagagcatccacaagttgcggcctacgatcgagagggtgatgtcgcaaacgtctcccagcttcttgcgcggaatcgtgtagccgatcgaagcctcctgcaaccgcacattcgtagccgaataggtgtagtactgcggagtcgtatcgccgttggcgacggtctggtaccatttctgcgcatcgatcaggtcgttgccgttgatgacgatgccgcccgcatcgcgcgcatcggccgacgaggccgatacgccgtagtaatccattacggcctgcgtgcgcgagtagactacgccgcccagacgggccgtgagcaggaacccgaaattgaagttgcgccagcggaagtcgttgcgccatgccagattggcgtcggggaatacggaacccagcttgatgaaatccttggtctgcgtcttgttgtccacgaagatgttgccgtccatatcctgatagatatcgccgttcgagtcgcggcgcaggtcggcgcgcgaatagatgtcgcccagcgagccgccctcgcgcagaatgaagcggacgttacccatgcctcccacgttcaggtcgccgatcggagtgaccttgcccgtgttggggtcgatcacctctttgcccagcttcatgatcttgttgcggttgacgctggccgtgaagttgctgtcccatgagaagcggttccacgtattcttgtagcccagcgacatttcgaaaccgcggttgcgcacgtcgccgtcctgcttgtagaccttgctgtacatcgaacttgcggggatgcccgtgttgaacgtctggttgatcgtacgggtgttatagtacgaaatgtcgaaattgaaatgtctgaggaagcgcatcgtaagaccgacttcgaacgatttggtgcgttcgggcttcaggtcgtagagcggactttgggacgagaggttccagctgttggtcgaagagttccacgagcgggtcggattggcgtagaaacgcgagaaagccagacccaccgatgcgtacgacgcacgcagcttgacgtaggagaggttcttgggcatgttcgggatgatctccgagagcacgaccgaagcgccgaccgacggatagaagaacgaggagttcaccgagttgggacccgccagctgcgaaggccagtcgttgcggcccgtcacggtcaggtaatacgcccccttgaagcccacctcggccgagaagaagaccgactgcgactgctcgcgccagccgatctgctcgcggacggtcttcgaattggagaggttgtagacgttgaacacgttggggatgttattcggctcgtagatggcgttgccgtccttgtcgtaaccggtctgctctccgtaggcgatcgggccgcggactttcgaggcgtcggaacgcatgtccgagatcgaagcgccgacgttggcctgcagactccagttctcgccgaaggtcttgttgatattgaccatcacgtcgccgtaggtctgacggtcgttggtcttggtgatgccgtagagaccgttgggcgatccctcggtgcgcaggttgttggtcgatgcgtagagcttctcggtatagtcgctgttcgagttgtccacccggatgcggcccgaaaccgagagccagtcgaggatgtcgtaggtcagcgaggcgttgatcatgtagcggtccttgcggttctcgcgcaggttgcggtagctgatccagtaggggttctgcatctgataggtatcggctcccatcgtcggccagtactgctcgtagatgccgcgcgaggggttgtagcgttcgtacatctccacatccgcccagtcgtcgccgcgcgggaagaggtaagccgacaccagcgggttggagtagacgccctgattgaccatgttgcggtctttctggataatgtagctggcacccagatcgaggtgcatcttgtccttgaggaacgacgaggtattgcggaaagtgaagttgtaacggtcgtaaccgttgttgggaataataccgcgcgaattgacggcgccggccgaagcataggtctggctgcgctcgttgcccgtcgagaacgaaaccgtctcggtgcccacgacgcccgtctggaaatagtcgtcggcagggtcgtagcccctgtaattgaacgcattcagacgttcgccccacgagtagatgccgttggcggctcccgccagcttgtcgcccgtgccgtaacgggtctggaacatcggcatcacgaaaggcgcgagcacttcggtgttgctcgtcaccgtcacggtcgtctgaccggccttgccgcgcttggtcgtgatcagaatggcgccgttggcggcatccgaaccatagagtgccgcggcggctgcgcccgacaggacggtcatcgactcgatatcctcagggttgaggtcggcgatggcctccgaagagccctgcgaatcgaactcctcgctgccgtcgctgcggaagttgcacatcggaatgccgtcgatcacatagagggcgttcgacgactgctcgatggatttcgaaccgcgcatcacgaccttcgacgaaccgccgacacccgacgacgaggcgttgatattcagaccggccaccttgccgttgagcgaattgacgaaattgacgtctttcacggccacgatgtcctcggcgttgatctgctgggcattatacgagagcgccttctccgagcgcttgatgccgagggccgtcacgacgaccgattcgatctccgatgcggcctcgcgcagcgtaatgtcgaacgaagtgcggttgccgacggcaaccgcctgcggctcatagcccagatagctcacttcgagccatgccgtcgaaggtgcgggcaccgaaagggtgaaacggccgtcggcgtcggtcgtcgtaccggtcgaggtgtcgcggacgatgatcgtggcgccgatgaccggctggccgctcccgtcgcggacataacctgcgacggccgcaggctgctcggctttctttacggagaggatgatgctcagcgaacggatgtcgtaggtcaggtccgcacccgccaccatccggttcagggcttccgtaagcggcaccgccgtaacatcgaggcttgtgatacggtcggtcttgacatccgaacccgtaacgaacagatatttggtctgccgttcgatctcggacatgatctgtgacatcgggacacggtccatccggatcgtaacttggggcaggctgcggttctgggccgccgcccgcggagaccagatagcgcaaagaccaagcatgaataaaaaagtaaatgaccttttcgcttgtctgataaatgttttattcataaatttgtactttaggtttgagtaggaagtttgcttgacctccggcctgtgcgatgtgctaccatccgcacgggccattttttgagggtccgacaatcataatatctgatttctcataaacttgggttacttcataggccggtcgttttaaggttggactgagtttatcgaatggttatcgtattgttctgttcgtctttctcgtactcgaaatcggcaaaccgctgcagcacctgaagcgcattgtcgatacctaccgactgccgtatcttaccctgtccgatacggatcgacggttcgcgctcgatacggattgtgacgccgaaggtcttttcgaagcggtgcatcagctcggagaacgactgatcggtcaggctgatgattccgttcgtccacaaatattcctcatcgttgtcgatctgcgcgagacagagatgcttcccttcgagcgtcaccatctcgtcgggttccagcaccagtcgttcgccggggacgagccggctggaaacggcgacgcggccttcgaacagagccgtcgagaagagcccgttctcctcctcggccacgacattgaatttcgtgcccagcacctcgacgtcgcaggcgtatgtccggacgatgaagggatgtttcgcatcgtgcaccacttcgaaccgggcttcgccttcgatctccacgcggcgctcacgccccgtaaagagcgccggatagcgaagcgtcgttccagcgttgagccataccgaggtaccgtcctgcaacgtcaggctgacgcgctgtccgtgcggcacggagaccgacagcagccgctcgccctgccgtgagaaatcgcgtgcggcgtgaaaataataaccgccgaaggcgagcagtacgactgccgctgctgccgcgctccaccggcgcaggacggagccgaaacggcgcctgcggtccttggcgtaaagttcgttgatgaccggggcgctcaaagccaccagatcgtgctgccgctgcacctttgcgagttccgattcatgtgcaggatcggcctccagccacgtcagcacggccgtttcctcctcaggcgatgcttggcacgccacatagcgatataatgtttccttttccataagttgctatattgacgcacgacaatgcgggatttgcgaaaaaaatcgcaaaatcccgcaaataaatatttttaataattccgggggggggctatccggccgtcagaggccgttcagcaagagtcctatcagcgggagataatctttgagcgccgctttgagcgcctccttcgccgcccgcagttcgtaggtcacctgcccttcggacaattcgtaaacggcggctatttcccggtaggacatctcttcgtaacggtgggcgatgaaaatccgccgccgctgttcaggcatccgccgcagttcgcgttcgatgatggcaagcgcctcggacatcatcagattctggggatcgttggcttcgagccgcgcgatacgctctccgaccacgcgcgcactggtctggtgcatgttctgttggattctgagatgaatggcttggtcgcgcagatagtccagacacttgcgcttgagcgcggtaagcagataggcgggcaggttccggggcgtcgtctccgtacggctctcccagattttcaaaaaggtatcggacaccaaatcctcggccaccatcctgtcacggacatacgacacggcgatccggacgaaatacgtcctgtactccgcatagacctcctccaaaccatgggggggggaaatttcgatagagcgattcatggcagaataaacgtccggtaaaagaataaaggtaatactttttgccatttccaccaattttttcccgccagaattttctgcggcgaacgacggaaatatataatatttccgatcctgtatatccggcggaatatagtccgccgcccccggaaaccctccgccgcatgaaatccgggcacgaaaaaacgccgttcccgaaaccgggaaacggcgtcctttcctaagcggaacccgctatttcttggcgtagcgctcttcgacgaccttccagtcgatgcggtcccagagggctgcgacagcatcggcgcggcggttgcggtagtcgatatagtaagcatgctcccaaacgtcgaagcacatcaggggcttcatgccgtagcgcagcggattgccggcgttctgctcgctgacgatcgccagcttgcccgacttgtcctccgcgagccatacccagcccgaaccgaacaaccctgcggcggctttctccatctggaccttcagctggtcgaacgatccgaaattatcgtcgatggccttcagcagcgcgcccgtgggacgggtctgcgccttgggcgaaagttcgtcgaagaagaattcgtggttccacatctgcgcggcgttgttgaagatcgcgccgtcggccgaaacgacgatatcctccagcggctgctcggcatagggggtatcgacaatcagttcgttgagtttattcacgtatcccacgtaatgcttgtcgtggtggaagcgcagcgtctcttcggagacctgcggtgcgagcgcgtcataagcgtaaggcaggtccttcggagtgaagcgcacctgttttgctgtgtctgttgccataagcggtaaaattaatagtgaaacaatgaggtttaacatagtcttcgtcgttttttattgttcttcgagaggttcgaaggcccatttgccttcgccgcagaccgggcatatccaaccgtcgggcagatcgtcgaatgccgtgccgggagcgatgccgttttcgggatcacccagcgccgggtcgtaaatatactcgcagacggtgcaacgatactttttcatagcgcgaaagaattaaaaattcacaccggctttcacaaatataataccgatatcaaagatctcaaaatattttcgtaattttgagtatacgaacaacaaattacaacctaaaacgctcttttgtatgacacttccgtatgcagaaccctacaagatcaaaatgaccgaggccatccgcacctccacgcgcgccgaacgcgagacatggatccgcgaagccagctacaacctcttcaaactgcgcagcgatcaggtcacgatcgacctgctgaccgattcgggaacgggttcgatgagcgaccgccagtgggcggccatgatgaccggcgacgaaagctacgccggcgcatcgtcctatttccggctcagggagaccatttcccggctcttcggcatgcctttcttcctgcccacgcatcaggggcgcgccgctgagaacgtcatcttttcggctctgctcaaagagggcgacatcgtgccgggcaactcccatttcgacaccacgaagggacacatcgagttccgccgctgccacgccgtggactgcaccatcgacgacgcggccgacacccagaaggagctgccgttcaaaggcgaaatggacatcgccaagctcgaaaagctcctgcgcgagaacccgcgcgagaaagttccgtgcgtggtgctgaccatcaccaacaacacggcgggcggacagcccgtgtcgatgcgcaacatccgcgagacggccgaagtatgccgccgttacggagtgcccctgctgctcgactcggcccgtttcgccgaaaacgcctacttcatcaagacccgcgaagccggttacgcggacaagacgatcaaggagatcgtccgagaaatctacacctatgccgacatcatgaccatctcggccaagaaggacggcgtggtgaacatgggcggcttcgtggccatgcgctccgaggagctttacaaacgggccatgaccttcagcatcatgttcgagggctacgtgacttacggcggcatgtcgggccgcgacatggacgcgctggccgtgggactggacgagaacaccgaattcgagcagctcgacgcccgcatccgtcaggtgaaactgctgggcgacctgctcgacgaatacggcgtcccctaccagcgtccggcaggcggacacgccatcttcgtcgatgcgaaaaaggtgctgcccaacctcccgaaggagcagttcatcgcccagacgctcgccgtggagctttacctcgaagcgggcatccgcggcgtggagatcggctcgatcctcgccgaccgcgaccccgacacgcacgagaaccgctatccgcggctcgaactgctgcgtctggccatcccgcgccgggtctattcggacaaccacatccgcgtgatcgccgccgcctgccgcaacatctacgaacgccgcgccgaaatcaccaccggctaccgcatcacgttcgaggcgccgatcctgcggcacttcaccgtggagctggacaaaatctgacgcccggaatccggcggtcagacggccgccgaatcgccggctcttccgtaaagaagccccggcgcaaaacacgccttacaccgcaaacgacgctgcaacactccggttgcagcgtcgtttctgccgtaaaaaccatatggcttccacctccgagcaggcttccgccagccaagccccgcaccgtctccgttccggctgtccggctccgtctcactcgtcctcgctccatgccactctgcattccattccgctccaccctatcccttcccgcctcatcctgcacctccggtccattccctcctgcgcacctttccgccccctctccctgttccttcccgcatccccctatttcgtcccgtccctccccattcccctccgttccgtcattcacccggctccgcccaccgaaattattcatcgaaaaagcagaaaaatgcgccgttttttttgttttttcatttccttgccccgtatttgtcctacaaataagattattccattcaatacctacccattcattaccgacaggactaactaatacccaataattatgttcaaactatccggactcattcccgccgtcttcacgccgttcgacaaaacgggcgcaatcaatttttcgcaaatccagccctacgccgacaaactcatcgccgaaggggcctacggcgtcttcgtctgcggctcgacgggcgaatgcacctcgatgaccgtcgccgagcgcaagagcgtgctcgaagcgtggaccaaagccgtagcaggccgcatcctcatcatcgcccacgtgggcggcacctgtcaggccgactgcatcgaactggcccgccatgccgccggactgggggtagatgccgtaggcaccgtcgccccgttctacctcaaacccggctcggtcgaagaactggtggccttctacaaacccatcgccgctgcatgcgcaccgctgcccttctacgcctaccacattccctcgatgacgggcatcaacctgccgatgatcgacttcctgaagaatggctcgaaagagattcccaacctgaacggcatcaagttcacgtcgaacaacttcatggagatgatcgaatgcatccgtttcgacggcggccgcttcgacatcctcaacgggttcgacgaaatgctgctctgcggcatggccgtcggcgcgcgcggcggcgtgggcagcacctacaactactcgctccgcacctaccaaaacatctacgacgccttcatggccggcgacctcgaacaggcccgcgcggcgcagcaggagtcggtggacatcgtgcacgtgatcatcaaccacggcggcggcatccgcggcggcaaagccagcatgaaactcgtcggcatcgactgcggcgactgccgtctgcccctcgccccctacaccgaggccgaaatagcccggctggacgaagaactccgggcgatcggtttcaaaaagtagcccgcatacaaagctgacaatcaacacgcacggctctctggcagattccgttccggcggtcggtccttccggccggtccggaacggaataaaataagcaacagtcccacgctctatatccgaaaacggacagaacgtgaagaaatgccggcctattctctccttcgtaataatttgcaagatttaccactcgagaataaacttacactttccgtgttagtcaatatgttactacaaatggaggaaacatattcggaaaatacaacaccgacacttcttttttgggactgttgtgagtacaatttacgacaaaacattcaaaacggcaatattgattctaaaatatcttatttcatattgcgggaacagcgtcttccgggaaagggtgcgcacagccgtccgatttgcaacggcacgcagacggcggcatacgcccccggacttcacggccgaacttcacagccgccggaaccgccggcgcgggacgcaaaaaaccggaccgcaaatccggcccggcacgcatatccgacaacggtttttacattccgaagagcgccagtgcggccatcggcacgacggcccaccaaagcgcgcgccgttttgccgcaggcatcagccgtgcaagggtctgcgagcgttccagccagcaaagaaatccgaaccacaggccgccccggaccagattcagcacctcggtacgcaccagcccggcataaccgcccgacacctccggatcataacctgcaaccaacggggcgatcacggccacaccgtgcaccagcacccgcaaaccggcataccagcggaccagaggcagcccataggatttgcgcagcgccagcgagcagaggagcgcaaccggcagcaatgccccggcaagtcccagcagctgcattccggcggtcaagccgtcgagccgcaggttcccgttcacgcactgcatcagcagcgcgaaagaccattcgcccagccgggtcatgccgtaagcgccgaacagccacaccggccccggcagttcatcgagattttgcaggaaaggggatttcataagacggaaacgataaatgttcagcgacaaaggtaataattttcgcggattgtcctttacgccgcttccgccggcccgttgcaaccggccgtgaattttgcggattcggtaattttcggacatggcatatcagactcagcgtttcggaccggtcatttcgtccgacagccggaaaagtgcatttcgcatccccggaaaaagaccgcgcaccctcccgaaagaggatgcgcggaacaacagatcagacaagatcaaactgccgggcgcaatcgccctcagtcaatctactgcacttcatccatattgatttcataaccggccggaacgaaggtccagtcctgcgcacggttgccgttggcgttggtgacagtcagaccgttgtacaggccgctggccgtagcgctgaacatattcagcggattgacctgagaactgcggcgcagattgaagaacatgaacgcaccgtagccctggcttcttgtacgtgttgcaagtgaattgagggtagaaggattggtagctccaccgagattggtcgatacaggcgaccaacgtgttttgtctacgagactggcaccgacgaaagaggtgccgaaataaccgtgataagcgtagtcgatgcaagctcttgcttcagtactgatagagctggtatagccccaatcgaataccgtgataagcttatcggcgggcatcagcgcatgcagtttgaggatgatctcgctatacgacgtggaattggtggagcctccatcatcggcgtactcatcatcgaatccgatgccgtcgagtccgtattttgccacggcatgggccagaatctgggcgaactgcgtggtctgcgtgctgttcatgctggcgacgccgatgccctgatggtcaccgagtacggtaagcaggactttgatgcccttgtcctgcagcggtttcacataagtcagataaccgttgttttccaacagattggtcatcttgtcattgaggtagagggtcggctcgaccacaccgttgaccgtacgtttacggacgttcgatgcgaagagttccacgataccggcaaacggcttgccgttcgacatcgtgtagtcacccgcgttaagcgggttggtgtcattggtttcgacatagatcgccacgaccggcgtatcgccgaatgcgcgggtttcgggagcctgtccctgatccatagtcggttcttcggcctgctggcaggagaacattgcggctccgataaagagagccatcgataatttaaataagtttttcatgacgcaaaaatttaagttagtaattgattttccccctttggcgggagcgttgataattctgccggaacttttccggcatttttctgacttcattcattaccaatcttttgtccatttattatatccgcgcctaccatccgctaactctcccagcttaatagcatcgaacatatactcattttccgagaagtaattcttaccccaagggctttcgtcgataaggtagactccgtcgtcagcaaagaatttatatccatccgtgatactgctggtccatgtactttcgtatttgtcctgaagaaccgtgcgcatctcttcgaaaaccagaatattgctctgtttatagccggcatcgcgccagagaaagacaggtgcgattcgctcagtcggggttgtttccgcctctcccgtataccacggaatattgacgcatccgtatttggcgggagcgagtcctgcgatcggcttgcggggccattccgccgaaacaaacgcggcgccctgatgccacggatcgacgatctgcatgtctttggagttatccagatagccggaccacgcatagtcgaggtatttgccgacctcgatgccgcccatagccgcagtatcccagaaatattcggtaggctccatatggtcggtaagcgttacgagcagtccgtcgcccagcgcttcgcgcacggctttgatcagtttggggtacgacgtcgtattcatcgccggcatgccctctttgccgtaaccggaattccggtcccagaaattcacgccatcaagtccgtattcggtaacgaccgccttcacctgcgccgtgaaatcggcgatctgcgcatcggtgaggttgcagaatcccaatcccttgccgccgccttcgatgctgatgcagaccttgcggcccttatcctgcaacggacggatatacttggtcgcatggccgaggacatagcgcatgtcggcacccagattcagtaaagcccgcgacgttgcagcgtcgtaatcgagtacgaccgtacgcagatttacaatatcgccgatggttctcgtaccgtcgggtcgttccggccatgcattttcccaattttcgtccagtttggacatcaggtattcatctacgagcaagggttgatacagagcggtattgaggtaaaataccgtgaacacctgttcctgattgagtttgtactcacccatctggagaccgcggaccgtaagcaggtaattgacagtctgccgttcggcatccgcagcgtccgcagcgtccgcagcgaccgtcaggggcaggtaatactcgcccggagcaagattctcggcaaaaaaacggatacgtttgagcgccgaatgctgggcatcgcctgcaatgtccagcttcttgccgtcgggaaagtcgtaattggcttcgggcagcagagtgcgttccgtctcgccctccccggctttcacggccgcttcgagggacagcgccgatccgagcggcttggtgagttgataatagaagttatcggtcacgaatccgttgccttcggtcagaaatacgcgcacctcgtcccggacgctccgggtactgcgcagcatgccgtaggtattctcaagcccgtccttgtcgggcagtttgcctccttcgcgttccacggggtcggcgtcgcaggccgtaaggcccgcgagcgccgccgcgcagaaaagcgtcactactaataaattctgtatcttttgcgtcttcataatttattcctccacttcattaattttcggaatctcgatgccgtcgggccacttcaggtcgtatttcgcctgaccgtcgttgccgtagcgcgagtaatccttcaccgtattgcccttgccgtcgttgaatttccagtaaccgagcagcgtcgggtcgtccttcgggttctcgacgttgtacatgttctcccagatctgttcgggagtgcgggcgacggaccagacgcgcgcctcggcgatcttgccgttcagcggacggtagtcgttgtacgaataactgataaagaactggcgggcttcgctatacgtatcgtagccgagcgtcttgtactgatccttcttgcccggatcggtctcgttgtcccacaggtcgtacagcgcacggcgggccagatggatgaagttcttgtcgtccagtgcggccggccccatctcggtcgcctcgctctgtatcctgccgttgacatagacacgcacgacgcgggtgttctggtcgtaagtgcaggcgacatgataccagtaacccttctggaggaccttcgtgttgtcgcgtccggggaatttgccgaatccgacgcccgaaccgtcgaactgcagctgttcgcgttcgaaattcgtgtcgccgatacgcagcagcgcatagtcctcctcgcccatcacggtcgaaatgctcaccggattgccctgaatgtcggtcagcgcgaaatcgtcgatgtagatcagcgcttcgtaggtcatggcccggagtttattccacggcatgctgttgtcgccgtacttgtcgagcgacgggaattcgatccagttgtccgtaagctgcgccgcgacggtgatggccgaagagcgtttgacgacataataggcggcctcggagcctttcagcaccgacatcgacgaatgggagatgcgcaccggcagcaggtaggtctcgtcgatgggcagcgcgccggtctgctgttcgccttcgcccatcagccctttcaggcggagcgtcaccacctccgacgcggtcttgccggcatggatggtcacgttgtcggacgacagctcgtaatacttcgcgtcgagcattttccagtccgaaccgtagcgggcgttgtaggtcgccacgagcgacgggtccaccgtgagcgacaccgcgacgtcctgcccttcgggataggccagcgtcgcctgaatcggcttttcgaccgtgggcgtattgttgctgaaggtggccggctgcacctcgtcggtcttcgacacgtcgaggtacacgacattgtcgaacttgtggtcatcggcatcatagttatcgcaggccgtaaaggcccccgctgccgcaacgcccagtatgagatatttatgtattaatttcatagcgtcggttatttagaaggattaagcgtctggatggcctgacggatcattttgtagttcatgtccgcattgtagtagtcgttgccgatgttgtaggcccccagtccgcgcaacggaccgtaggctatcacgcggcgcgacatctcctcgacagcggcatactccacgcggtcttcgtccttgaggggcgctccggcctcggccgccagcaggagtttcgaagccggaacggccgcgtaacccgtggcgttgagtatctgcagcttcacgtcgccgacatcttcggttttctcggtgtcgaggatgaaataatccaccttcgcacggtccgcttcggcgacgaagagcggattgccctcgaagacgagcagcttgctctcgtcggccgagagtttcgagacgatcagcgctgcggcctgcaccgctgccggatcgccggcgttgggaatcccagtgaacgaatagccgtccatgccgttggcggcgacggacgacacgatccggtcgagccatgcgcccagtttcgcggcgtcggcgaattcggcggcacgtccggcatagtccacctgccagagcactttcgtgcctttctcgcgcatgacggccatatcctcggcatcgtaacgcgagaaattgtcggcattggtcagcgccacgatatcgagcgaatcgggcaggcagcgcatgaagtccttctcgctggccgccggttcgggcgagttgtgcaggcgggcgtagacgatgaaatgctcgctctttttatagtcccgcagagcggccgtatattccgcccacaaggccgggtcctgctcccacggtttcttcacgttgttgtccacggcctccatctcggtccagtcattgcaggcggcaaggccgaagagtacgccgaggagcaggaacaaaccggagaaacgtattattctgtgctgtttcatagcgtttagttgttataaggtttcacgtcccaccatacgcgggttcccatgccgtcgcccttgcggctgccctgcgactcgctgttaagcatctgtacggcttcctgaagattggcgttgttcttgtcgtattcctcgacgggataaggcagacggcgggcgccctgagccagatccaccgtaccgcccgacttgtcctcgacggcgggcagcaggcgcggataccccgtgcgacggtgctcggaccacgcctcgacgcccagcgggaagatggcgatccatttctgggtgatgatacgctccagattgcgctctttgatggccgccttgtcggcgccttcggcggaatcgtcctcccatgcgatggtgatcgaactcagggcggtcgcgctgtaattgcccagcggatcgttataggccgcaggttttctggtcttgtcggcgatataggcatcggcatccttggcgcccttgtcctcgaacgagaggcggatcgcctgctcgtagagcgccttggcggcatccttcgttccccagcgcagctcgtattcggccttgaggaaagccacctccgccgcgttgatccacaggtaaggcgtcgaactggtaacgatcatgttcgaatacttggcctgcgcctgcgatttgctcgtgacgtcgatgccgatgcggatgcccacgtaatcgcccttgtcgttgggcaggaacatcttttcgagacgcgggtcttcgtaaccggtcatgtagcagagaatgtcggcgccgacgcggtggtcgccccagtcgttgtagatcagcgtcgtgcggttctcggcggcgtgcatggccgcgttgtcggcattggccgtgatgacgcctgcggcgatggcttcggcagccttcgtccgggcgacgtcgggcttcacttcgctaaggcgcatcgccatgcgcagcttgagcgaattggcatatttgagccactgggcgatattgccgccgtagacccggtcgtagcggctgaaagcctcggccggaagcgtcgtattggcggcgaaggcggcgatcgcctcgtccagctccccgaacatcttcatatagacctcctcctgcttgtcgtacttcaccgtaatcgactcgttggtttcgaggttcgaatagggaataggcccgtaggagtcggtgacgcggtgcatgatcgccacgcgcaacagtttggcgaaagcgacggccacctcatcgtccgtaccggtgacgatgccgcgccacggcgtgtaagtctcggtaatcacgttggcgaacggccatttgcgccagtcggccgaaggattgaaggtctcgaacttcgtgagccagctgtctaccgtcgctccgatatagccgccgaacggaccgcccgacaggctttcgttgaactggtacatatgctcctgcacgggaaccacgagtccctgcagcgactggaatttcgtgccgatcttgtagttcagggcatccatctgcccgtcggtcacctcgttcggattgcgattcatgttctcgaaatcgcccgtacacgaaatgctgagcagcactaccgaaagcagcagtagctgcatgtatgcatttatctttttcatgctgttcatggtttagaattcaaatttcacgttgaaacccagactgcgcagcgacggcatcatgaagtagtcgatgccctgatagctcagccccgtcgaagccacggcttcggggtcgaaaggagccttgcagtagatcatccacaggttgcggcccacgaacgagacggtgagtaccatcttgttgcggaaccatttgcgcggcagcgtgtagcccagcgacagctcctgcaggcggaagttcgtggccgaataggtgtagtactgcggaagtcccgactgcgaaccgatagcctgataccatttctgggcatcgaccatctcacggccgttgatcagcacgccgcccgcatcgcgcgcggctgccgaaacttccgagacgccgtacaggtccatgttggcctgcgtagccgagtagcagatgccgccgatgcgtcccgtgaacagcaggccgaggttgatccccttgtagcggaagtcgttgcgccatgcgaggttctcgctcggaaaaacggagccgagatagatttgctcgccctcgtcggtgagaagcaggttgcccgccttatcgacctcgacataaccgttgtcgttgaatttcaggtccgaagtggtatagaggtcgcccagcgtgccgccctgcttgaggatgtatttggccttgcccagccccttgatgtcgagttccgaaagattcagcggctggcccgtaacgggattcaacgcaccggaagccaagtcgatgatctcgttcttgttccacgagaaggtaaagttcgacgaccagccgaaatcgcgccactggttcgaatagccgagcgacagctcgacgccggtattgcggacatgccccgtctggaggtagatggtcgtataggacgacgacggcggaagcgccgggtcgaacgtctggttcttcgtatcggcggaataccacgacgccgaaaggctgatgttcttccacagacgggcgtcgatacccacctcataggtgatggtccgttcgggtttcaggtcgccgatcggatagtgcgtcttatccttccatatcttgccggtagcatcgtactcgtaggtcggcgtggtcaggaaacgcgggaacggcaggccgaccgaggcgatcgaaccgcggagcttgaggtaggagaaggcgttgcccaaatcccatgtcgaggagggaacccacgaaaggccgaccgaagggtagaaaaacgacttggagggcgacccggcgatctgcgaagcccagtcgttgcggcccgtcgcggtcaggtagagcatctgtttccaccccacttcgaccgatgcgaagaccgactgcgtctggtcgtgccagccgaccttctcggcgcgcttcttcgtgtcgtcgaggtcgaatacgttgaagatattgggaaggccgttctcctgaatcggaccgcggtacgaaagttcgtcggtcttgatgttgttgagcgaagcgccgacgttggccgtgagcgaccaatcgtcgccgaaagtcttgttgatgttcagcatcacgtcggcataggtctgcgtatcgtaggcacgggcttcggtatagtggccgttcttgccgccgtcggtgatggtcgtgttggacgaggcgtaaagtttctgcgtatagagcgaattggagttgtcgagacgcacgcgtcccgaaacgctcagccacggcaggatgtcgtagctggccgagaacgacagcatgtagcgcttcttgtcggtattgcgcaggttgcggtaggcgatccagtagggattctgcatgcgcaggtcgccgccctccatgtccgccgaccagaactgctccatgagtttggtgccgggattatagcgttcgaatttcttgtaaatcgcgaaattctcgccgcgcgggaagagataggccgggaccagcgggttcgaatatacgccctgattggtcatgttctggtctttctgatagatatagctggcgctggcgtcgagccgcagtttatctttcaggaagtaagaggtgttgcggaaagtaaagttgtagcgatcgtattcgttgttgggaatgatgccgtcggaattgaccgatgcggcggaaaaataggtctggttcttgtccgtaccgccggaaacggtcacggcgttggtgtacacgtgtcccgtttcgaagaagtcggcgggcgtatagccgtagcgggccgcgggcaggagcttctggccccagctgtaaatgcccgaaccgctcctcacgccgttcgaacccgtgccgtaacggttctgaaactccggctgcacgaaaggatcgaggaattcggtattgctcgaaagcgtcactttgagcgcgccggccttgccctttttcgtcgtgatcatgatggcgccgttggcggcgttcgaaccgtaaagggccgcagcggcggcacccgtgagcaccgacatcgactcgatatcctccgggttgatgtccgcgatggattccgaggcgccgcgcgaatcgaactccgtacctccgcctccgccgaagttatacatcgggattccgtcgatgacatagagcgcattggacgactggctgatggacttgttgccgcggagaatcaccttcgacgcgccgccgacgcccgaagaggaggcgttgatcgtaacgcccgcgaccttgcccgtcagcgaattgatgaagttggcgtccttgaccgtggtgatgtcctcggccttgacctgctggacgttataactcagggccttctcctgacgcttgatgccgagggcggtgacaacgacgccctcgatttcggaagccgcttcgtgaagcgtgacgtcgaaggaagtccggttgccgacggaaaccatgacgggttcgtaccccagaaaattaacctccagctgggccgtagccgcgggggggggtacctgaagcgagaaagttccgtccatgtccgtactcgtgccgacggtcgtgcctttgaccacgacggacgccccgatgacgggaacgccgttgacgtcgctgacctttcccgtcacggcgacgggtttttccgcggctttctcggcaagaatgatgtacgtgccgtcgatcttatacgtaatatccgtatttttgagcacgtagtccaatacttcctgaatcgttttctgcgtcagattgactgagagctttttaccggtgtcgacacctttgttgataaaaagatagcgagtttgtttttcaatctctttcataacctgcgacatgggcacgtcggacagattcagggttatgcgcgcattctgtgcctgagcggttaagacactcgcgctcagagagattgccaatacgaacccaaacagtcttcgaaaggttttgaagaatactgttttattcatacttttgtaaagtttaagataataggttaatgggtgcaagaatcatttaatctgttatcttcgcctgcggaggtccagtccgcaggctttttttatcggtcaaatgattcggatcgtcaagtcgtcagttgtttttcatgcgcatatcttaccggggttttaggttaaacaataacaggcggaggatcagcggatcgtcaccacattggtctcctcatccttctcgaaggaaaaatcggcggcgtactgcaagatgtggagggcattctcgatgccgtcgttcacacgaatcttaccgctgatttttccgatgtcgggaatcgaattccgcgcgatgacgatcttgacgtcgaacacctgctcgaacttggccatcagttcatcgaacggaagtccgctgatgcgcaccagaccttcggtccagcagagcgcctccggatccctgatcgtctcgacgaacagacggccgttcgaaagattcacaatatcatcgggtttcataacgatctcctgcctgcgcggatcgagcaggttggtaactttgatccggccctgcagcaatgccgccgaaaaccggtcgtaggtctcgtccgctattacgttgaatttcgttccgagcacgttgatcttggtcgcaaaggtctcgacctcgaaggggcattcggcgtcgtgacgcacgtcgaacagcgcctcgcccgaaagtttcacgctgcggagattctttttgaatacgaccggatattcgatccgggcgcccgaattcagccagacgcgggaaccgtcgggcagggtgatttcgatgcgctggccgttgggaacgtgcaccgcagtcagccggtcggaaatggcttcgtacgtacgctggtgggcgacatacccgcccgcaaagacgagcagcagcacggcggccgcacgcatggcaaagatccacaccttgcgccacggaatgactattccgcgcggccggagcgctccgcccctcgcgtcgtttccgtacaactccatcccctcgaatacgaagcggacgatgtccagttccttctggttggcaaccggatcggcttccagccactccgcgacctgcaagtcctcctgcggcgtggtatcgcctttaagatacctgtataaaatttcctgattcacgttattttctgtttccgtctctatagtataaaacagtcgggcgcgacgactttacaggcatttttgcgatttttcaacaaataaatttatttattaaattcggtaaaatatttattaaatcatatcactgaaaatcaaccggatagccacaacgaacaaatcccgtccgctgactctccggaaagaaattattccggacacatccgccgcggcattccgcaaaaaatccgcaccggaatcggcattcccgaaaaattgcctatatttgcagacacaatatcacacgagtccggctccgcagccggaggtccggactccgggtttcatacaggctgtaacgaaaaaggcgccccgccggcacctttcatgatttattgcaggaactcgaaatgaaaccgacagacccgacaccccctccgcgacaaagtgcatcactcatcagacgaatatgaccatcgcgcgatagttgcgctttttccgaaaaatgctaactttgacctcaacctacccggcataaaagatggatagacaaacacccgtactgacttcggacgaattcggaaagttcttttccgaatacaaaaaccgttttgtcagcatcgcatacgggtacgtacacgatacggatatcgcgaaggatatcgtaacggacagtttcatgtatctttgggaacaccgggagcaggtgaatatggccgaaaacatcaagggatacatctacttttgcgtgaggacccgatgcgccaaccacatcaaagagcaggaggtgctccgcagggccaaaaacgagatcaccaaagacgcctactggaagctgcaatccagcctgaactccctgagcagcgacgagctttccaaaaaactcttccagtcggaaatcatcgaactgttcagccgggaactcgccaaaatgccggagctgacacgggccgtctatcaggccagccgtcaggagggactcacctatcagcagatagccgaacgatacaacatctcgacccgacaggtggcatccgagatgcagcgggcctatgcgcagctccgcgttcccctgaaagactatctgcccgtaatcggactcctgttcgccatgctctcgaaatagccggagcgcatccgaatttcagggcagccttcgccgggcaggcagtccgggcggcgtattcgggcagactgtcagggcggcgatccggactgcccgcatgaaaattccccgacgccaccccatgaaacggcaaaaaaaggagacccgacgagtctccctttcaatcagctgccgctgcgacgcgctcagatcagcgtttcgagaatctgcacggcattgagcgccgcgcccttcttgatctggtcgctgacgcaccagaacgtcaggccgttttcgcaggtcaggtcgcggcggatgcggcccacgtagacggggtccttgcccgcgatgaagagcggcatcggatagactttgtccgcaggctggtccatcagcacgacgccctttgccttggcaaaggcctcacgggcctcggcgaccgacacgggacgctccgtttcgagccagatgctctccgaatgggcgcgcatcaccggcacacgcacgcaggtcgccgacacggcgatatccgagtgcatgatcttgcgcgtctcgtggaacatcttcatctcctccttcgtatagtcgttgtccgtaaagacgtcgatatggggaatcacgttgtaagccaactgaaaggcgaatttattgacggtcggctccttgcccgcgcccagctcggcgtactgctccaccagttcgtccatcgccgcggctccggcgccgctggcggactggtaggtcgagacatgcacgcggcggatgtgcgacacctgctcgatcgccttcagcgccacgaccatctggatcgtcgtgcagttggggttggcgataatgcgacgcggagcgttcttcgcatcttcgggattgacctccggcaccaccagcggcacctcggcgtccatgcggaaggcgctcgaattgtcgatcatgaccgcgccgtgtctggtgatcgtctccgcgaattcgcgcgaagttccggctccggccgaagtgagggcgaaatccacccccttgaagtcgtcgttatgctgcaacagtttgacagttatatcctttccgcggaatttatagacacggcccgcgctgcgctgcgaaccgaacagcagcaattcgccgatcggcaggtcgcgctgctccaaaatcctcagaaattcttggcccacagcaccgctggcgcccacaatcgcaatcttcatctcgataaagttaaaaaatgatcatcgtttccgctcggacggaccgtacacggaagcttcgggacaaatatagcgatttcggcgcgaacgacaaaaaaatcggccggcacagcggccggccgactctgttcagtcgaagaaattgtcgtcgtccgcatccgggacacgcccctcaggatcggtctcctcgtcgcagtcgtagcgcggcatcatcgccgggcggataaactggtcgttgcggctcaggccgagacggccgtcgtcgtagacccgtttcatgaagtcgcccacgatcggcaacgccatcacgctgccctcgccgcccgatacgaaatgcaccgactgatcctcgccgccgacccatgcgcccgccacgagtttcggggccacgcacatgaaccatgcgtcgcggttcttgttcgaggtgccggtcttgccgccgatctccacgcccgaaaagccgtaatcgcggttcaggcggccggccgtacccgacgtcaccacgccctgcagcatcgtcagcatcgtataggccgtgcgctcgctgacggcgtcctgcgactggggtatgaagttggcgatcacgttgccctgccggtcctcgatgcgcgtcacgaaaatggcgtcgttatgcacgccctcgttagcgaaggtcgagaaggcgctcaccagctcgaaaacgttcgattccgacgagccgagcgccagcgccggcacggggtcgatatagctgcggatacccatgttgtgaatgaagtcggcgaccgccgcaggctgtttggcctgcttcatgatccacgccgaatagttgttgcggctgcgggcaagaccccagctcagggggtgcatcacgccgtcgtactcgaccttgcccgcctccttgggcgaccacgccgtgccgttggccgtctcgatcgtaacgggcaggttgggcaccatcgtgcagggcgtcagccccagatggtcgatggcgaaggtgtagacgaagggtttgatcgtcgaaccgatctgacgtttgccctgcttggccatgtcgtatttgaagtagcggaaattgggtccgccgacgtacgccttgacatatcccgtacggggatcgagcgccacgaacgacgcccgcatgatacgcttgtggtgcaggatcgagtcgcgcggagtcatcagcgtatcgcgttcgcccttgtaggtgaagaccttcatcgagcagggtttgtcgaacgaagcgttgatctccttctcgctcgcgccggcgttcctcatctcgcggtagcggtccgaatagcggacggcgtgacgcatgatgcgctcgcgctccgccttgtcggcgtcgataaagagcgtcttggtgcgccggtactgggcgtccatgcggggctggatgaccgattccatctgtttctggacggcctgctcggcataggtctgcatcgtcgaattgatcgtggtatagatcttcaggccgtcgcggtagatgttgtagggcgtgccgtcggccttgcggttcttgcggcaccagccgtagagcggattctcctcgtactccttcaccgcctgatcgtagtcccactcgttgtagaactgattgcgtttgggacgttcggcgttcatcacaagacgcagcatctcgcggaagtaggtcgccgtaccttcgttgtgcgacacgggacggtaattgaggacgatgggaagcgcgctgagcgaatcgcgctgcttgcgcgtaatggccccggcgtcctccatgcgcgaaatgacgaggttgcggcgcgcgagggcgttgtcgtaattccgcaccggcgaataacgcgacggggcattcaccacgcccaccagcacggcggcctcctgcacgttcagctcgtgaggctccttgttgaagaaggtaagggccgcggacttgatgccgtaggcgttggagccgtactccaccgtattgaggtacatggcggcgatctcctccttggtatagttgtattcgagcttgagggccgtgatccactccttgagcttcgacgtgacgagcttggcgttgcggaccagccgcccgcggttgcgcaccgtgtcgcgcggaaagaggttcttggccagctgctgcgtgatggtcgagccgccgccctgcgaggtgttctgcaacagcacggtcttcactgccacacgggccagcgaggggatgtcgatgcccgaatgggttctgaaacgggcgtcctcggtggcgatcagcgccgcgacgatcggcggcacctcgtgtcctccgagccggatatggagcgtcgaatcgtccgggaaaagatcggcgtactgaacgtaggaacggttctgcacgaagaaggtgccgatgaccttgccgtcctcggaatagatctccgtggcaaggttgctgcggggattctccagctcctcgaacgaaggcatgcggccgaacagcccgaaggcggtcagcagcagcatgaagaagagcagagcgaacggcgcgaaggccagacaccagatccattttatcgttttcggactcacgtccgtctttttcttctttggcataggacttaattttgcgctaaagatacgaaatttattgcaatcagaacggaagacccacggcggcggcccaccacacgccgccgtttgcgggatgatagaccgacagcttgaaggtcgaagtcgccgatgcgggctggcggaacgcattgatatcgaatacgatgtcgccgcccacggaccagatacgccgccacttcatccctccgcggcccacgtcgcggaactgggcgtaatcgccgccgacgttgagccggatgcgcttgaaatagagcaccgatccgatgcccccttcgggataccacaccggcagctggtagtcggccgagacggccgtatagttgttcgaaataatatccgacgaggtatatccgcgcggaataaggcgcgtcgagcgatagctcagcggcgcgtatcccgacgggaacttgtaaccgccgatcgaggtctggtaagtagcggcgaccttcagcgagttgtgggccgcgaatccgggcaggtatgcctgtccgtaaaacgaaatcaggtcgctgaaatgggtgttggccgggttgaaggtataggcggtgctcagcatatagccccagcgcggcgcgaagtcgcggtgcgccatgcgcacctgatccgagtaccccagtccgaacgagagcttgtgcagtcccttgcggaaaccgatgcgctggatattggagatctgtccggcgttccattcgattttacccagattggctaccatgccgttggagtagttccagccggaggtgacggagagctggcgcgtgtgatagccccgctggaaatagagcggaagcgtggcggagagtcccacggagtagtacttgtcggggctgggacgctgctggtactcgtattttcccgtctgctcgtcgtactgtcccaccgaatagaaaacctgattgccgccgtacgaagcgtcgaggtcgagacggacgcccagcccgaaatagcgcacgcccagattgaaaatcgccccttcgttgcggttccagccgtacgaagcgaaggcttcggtattcgacagcagattctgcgaaagcagggtgacgcccagattgaggttgatattgtgttcgtccacggcctcgaagggattgaaggccacgggggtccagctatggacattcaccagattgggcaccttgcggtatcgcttcgcgcggtacaccccctcctgacgcagcgaatcgactgccgagaaacgcaccgtatcgaggttcacgacgtcccaccgcttgcggtcgggattcacgacgttgagcggcagtttcgaaggcgcgaccgggatcagcgcgtcggcatcggcgtcctgcgccgccacatggtaaccgcgcctgtcgtaggcggtcagcagcacccgttcccgcccctcgccgtcgcgccacggcaccggcatgaacgatccgtaagccgacgtcgtgatgcggtattcgcggcgggtcttcaggtcgaaacagtgggcttcgtcccggcccgaagcgatcgagccgaaatagagcctgccgccgcccgcgcggaggttgctcagcgtaatgtaggcgccttcggtaacgggatgcacgccgtcgccgtcgatgcggccgaaccacatgcccgaatcgtcggtgacgataacgtaatagccccgcgtggcatcgtcccacgccagtccgtgaatctcggaccggtcgggcgtcgcaaagcgtttctccgcgccctcctttccctgcacgacgaccgtatagcggccgtcgggattgtattcgacccacgcgacggcatcctccgacggcgtgggatagagcgcgttgcggcgtccgacgaccatccggggcgtaccgtcggcgaggtccatgtagcacaactgcgaattgacccgctgttcgaagagtttcgaacggcgatattcggtccaccacacgcggccgccggccatggcggggcgcgtcgaaaccgcccccgtatagcagatcacctcctcttcgcccgtgcgggtgtcgagccgcacgaaacgcgacggccggtcgtagtcggtcttgagcgccagcgccgacgcggcgtcgagcggcaggggccactggtaggtcgtgtaattgccggcgggcatcggcgtcagcggctcggcgctgtcttcgacctgcggcagcgactcccagtgccgctccagcacgtcgaacgtctcgcggaaaagccggctgacattggtgtcgtaatatttttcgagcgcgacgcgcgtcgtggccagcacataggggttacgcgagccgtagcgcgccaccttgtcccagaccacctcgccgtagcgatcgtaggcgtaggaacagatctgatagcccagctcgtaatggtcgggaatgtagtcgcggtaggagccgcagaaccatttgtcgatgttgcggcggtcgcgcgtgtccttccggtcgcggcctacgcggcccatggcgcggtaacccagcgagaacgagggctgaagtccccggccgaacgacgacatggccgtttcggacatcacggcgtcgccctccatggcccagatcggcatgcagagcaggccgatggtcgaaccctgctgccccagaatatagctcagggcgcggataacgccccggtcaaggttgttgtactgcacggcatggcggtactcgtgggccacgagctgtttgtaccacggcatcgaatagccgtcgatcgcgggcgaggtgaggaactccacacgtttcgggaggtacatcaccagtccgttcgactggaaattttcggggtgcatgacgaagggaatacgcatcggaccgtgacggaatccgaacgcaatgtcgggccggacggtacggatgtagaacagcgtacgccgcgccacggccgaaaccgtatcgggatagatcatccgcacgtcgggcgtacggatcgtgctccatttcagccccgcggggtccgacccccacgtatagtactgggccgaagcctcgtgcgcgaaaccgagggcgcacaacaagaggaggatatgcagcagccgcttcacctacgaaccggcttttttgcagcggtagccgctcttggtgagtatctcgaccacacggtcgcgatggtcgccctgaatgatgatctccccctccttggccgcgccgccgacgccgcatttggttttcagcagacgcgccagttcctgcaaatccgcatcccgccccacgaagcctttgaccagcgtcaccaccttgcccgcgcgctgcttgcggtcgagccacacgcgcagctcctgccgcgccgggggaagcgtctccgcctccggtgtttcggtcgtttcatagttgaagtcgggattggtcgaatagaccattccgagcctcgctttccaatcgttgtccgccatattgttcgaaatagtagagatcaaacgtcctttcggaacctcttattttgtgcaaaaataataaaatattacggttgtgcacgcccgacggccgagatcggcgaaaaagagcgcattccgccctcaaacggcggcgcacgcccacacgtagatggaagcgggaaggcggagccggagaaaaagcgacagcgacgcaaagaagaagcggcgcaaagaagagacagcgcagaggacggcagcgcagaagaacgacggcaacacagaagaaccgcgacagtacagaggaccggaaccagcgcaaaagacgggatccggcgcagaggaccggaaccggccgccccgccgctgcaaaaaatcccggccttgggaagaaattccggccgaaatcactatctttgtttccgtatggctaaaaagttcggcgacaaactgcgcagattcaatcccttcacgcgcccggcgactctcgaagagctgcccaaaccgctgccggccaatcccgaccagcggctggtgaaggtctacgtagaaggctacgaagacgtggccttctggcgcggcatcttcgaccacttccagaacccctacctgcgcttcgaaatctcggtgcccaaccgcgccgaccttcccaaggggaagaaggtgctgatggggatgatcccccgctcgtcggaggagctgatcctgtgcgtcgattcggacttcgacttcctgttcgccgaccgcacggagcagtcgcgcgaggtgaacgccgcccgctacatgttccacacctacgcctacgccaccgagaacttcctctgctacgccccctcgctgcacaacgtatgcgtcaaggcgaccaagaacgacacgcgcatcttcgatttcgtgcatttcatgcacgaatactcctgcacgatctacccgcttttcctctggtacgcctactcggcgcagctggccacggagaacgtattcccgctgatcgacttcaagtcggcggtgcgcatcggctatctcgacctcgaaaacaacggcgagaaaacgctggcgtggctgcagaaaaacgtcgccaaacgcgaggagatgctgcgcaggcgcaacccgaagatgatcgacccaatgctcgaattcgaacagcagctcaagagccggggcctgacgcccgaaaacgcttacctgttcatgcacggccacacgctgatggacaacgtggtgatgatcctgctcaactccgtatgcgagaaactgcggcagatgtcgatcgccaagatcaccgcgtcgaaaaagcagggcgtggcactcaagaacgagatgtcgaactacaccaattcgctgcggtcgatccgcgacgtgctgctcgacaacgagaactacaccaaatgtccgctttacaagcggctccagcgcgacatcgagaaatacattgcccgcacgatctggaacatgaagcgcagcggcgaaatccgcgacgactcgacatggaccatcctgcgcaacatgcggcagggataggtaagagcaaacgatacgagagcggccttcgcaatgaaggccgctctcgtatcgtaatttcgggaccgcgggcgaaaactccacagccggattccgcccgaagctccggagagccggagaaccggagaaccggaaagccggagagccgacggggcggaagcgccccggacagcagccgtccgccactacttcttgcgaaccacgcgcacggtggactgcgtggcctgccgcacgaagacctgcgggccgcgggcgtacttgcgccacaactcgtcggtatagccgcgcacggtcagcaactccatattctcggccttcatcacgtcgaagcccgcttcgcgcagcgcctcgatcgcttcgtcgatgtgccacgagttatcgacgcacaggctcaggttcacggccgagttgtggatcagattggtcttgatgcggaaacgctccagcagcgagaagatcgtggcgaacttctcctccagcacgaacgagaagtcgcgcgaacggatcgtcagcagcacctgatccttcttgagaatcaagatcggcacctcgaccggcgccgacatgccgcgaatcacggtgcccggtttgcgcttgtcgccgaaaggccgcacgtaaagcggaatattcttgttctgcagcggtttgatcgtcttgggatggatgatctgcgcgccgctgtaggccagctcgatcgtatcgaggtagttcagttcggcgatctgcacggcgtcggggaaaatcttcggatcggcgttcagcacgccgtccacgtccttccacacggccatcgactcggcgtcgaggatattggccaccacggccgctgagtagtccgagccttcgcgccccagcgtggtggtcgtgccgtcgggcgcaccgccgataaagccctgtccgacaaagatattctcgacgcactcggccagcgcgcccttcagcagcggcgccgaagcttcgatatcgaccccggcgtccttgtgacgctgctcggtgaggaaacagcggcgcatgtcgatccagcggttcgacactccggcatagttgagatactccgagatgatcgtcgtcgagaccaactcgccgaaggccacgatcgtatcgtaccacaattcggcgtcggagggtttgtaaaccgtttccacggccacgcgctccagctcgtcgaagagcgcatcgacccgttcgagctgtttatggccgcgccacaaatcgtcgatgatgcccgcatggtactccctcagcgcggcgacatgctccatggagagctgtttgtcgcccttctgaagtccttcgaacaccttttcgagcgcgttggtcgtcttgcccatggccgaaacgatgatgaagagattctgctcgtcgtcgataatcttgcgcaggttgcgcactccgtcggcattacgcaccgacgcaccgccaaatttgtaaaccttcatgttatctctctttttaacctaacctaccttctttaccgtccgaaggcgaccggccgccggactcccgcggcggaacgccgcgtcgaacgaccgcaccccaacgcctcacgcaggaggcgtttgccgcggcgcgacagggcttccgcccggatcatttctgttttttcacctctttgtaaggcactccgatattctggaacaggaacgaataggtgtccgcctcctcggcgatacgtttggaggtgggtttgcccgccccgtggcccgcattcgactcgatgcggatcagcaccggcgcatcgccggcctgacagtgctgcatctgggcggcgaacttgaacgagtgcgccggcacgacgcggtcgtcgtggtcggccgtcgtcacgagcgtcgcggggtatttcacaccctcgcggatgttgtgcagcggcgaatatttataaatgtagtcgaactgctcctcgttttcgctcgatccgtactccacggcccagccccagccgatcgtgaatttgtggtagcggagcatgtccatcacgcccacggcgggcaggcagacggcatagaggtcgggacgctgcacctcgcaggcgccgaccagcaggccgccgttcgaaccgcccgcaatggcgagcttgtccgacgaagtgtatttttcggcgatcaggtactcggccgcggcgatgaagtcgtcgaaaacgttctgcttgttttcgagcatgcccgccttgtgccacgcttcgccgtactccgagccgccgcgcaggttggccacgcagtagatgccgccctgctcgacgaacatcatggccgagggcctgaacgcgggcgtctggttgatctggaagccgccgtaggcatagaggtagcagggattcccgccgtcgagtttcatatccttgcggcgggtgatgaacatcggcaccttcgtgccgtccttcgaggtgtagaacacctgttcggtcgtgaacagcgagggatcgaaattcaccgcgggggctttatagagcgtcgatgcgccgccggcgatgtcgtatttgtagatcgtggcgggcgcgatgtagttggtcagcgaatagtaaagctccgtatcgtccttctcgccgtcgaaaccgctcaccgtgccgatggccggaagttcgacctcgcgtactagttttccgtcgaaaccgtactggcagaccttgctctgcgcatgttcgaggtaggtggcgaaaagataccctccggccgagccgacgccctccagcagtttcccgccgctttcgggaatcacggtcgaaaccttcgacgggtcgttcaggtccaccttcatcagcgcgtagttcgacgcgtcgcggttggtcacgtaatagagctggccgtcccggcactcgacgggcgcatagtcggcgtcgaagcccggcagcaaggtgcggaatttcggttcggagacctttttatagagcacttccgtacccgacgtaccctccgaagccacgatgaagagccactgcccgtccttgctgggccacgggctgaaataacgcaacggatgctccgcgtcggcatagaccagcctgtcggccgactgcggcgtaccgagacggtggtagtagaccttctgaaactggttctgcgacgagaaaacgcccttctgaggagcgtcgtacgcactgtaatagaatcctttggaatcgggcgcccactcggctcccgaaaacttcacccagttgatccggtccgaagtcagcgtacggtcggcagtgttcatcacacggatttcgacccagtccgaacccgatgcggcgaccgagtaggcgcagtatttgccgtccttggagaaggtcacgcccgaaagggccaccgtaccgtcttccgagagcgtattggggtcgatgaacacttcgccctccccgcccggctgcacggtgtggtagagcaccgactggttccgcagtccgtcgttgtagaaataataccatgcgtcgccgtgtttggccggaataccctctttgggatagttccacaattcggtcagccgttcgcggatcgcgccgcggaacggaatctgcgacaggtaatcctgcgtcacaacgttctgggccttcacccacgccgccgtcgcctcggaattgtcgtcttcgagccagcggtagggatcgggaacctccgtaccgaaataattatcggtcacgtcggtgcgctccgtccggggatagggcatgtgttttatctgtttcatatcgttgcagcctgtcagtatcgccgcggcgcccgcgagggccgccgccatgcgcggtaatctcatcataactatacggtttgggtatatatcggggcaaagttaggaaaaaataagatagttcggcctgcggatcgaagtttttgcgtaactttggcttgcaaaaacactcggaaaattatgtacagcgaactgaaagagataatcgggcaggcttgggaaaaccgcgagctgctcaaggaggagtccgtgcggcaggccgtgcggcaaaccgtcgaactggtggacaagggggagctgcgcacggcgcagcccgtagatccggagaaaagccagtggcaggtgaacgaatgggtcaagaaggccatcatcctctatttcccgatccagcccatgcgcaaaatggaagcgggcgagctggagtggtacgacaagatggagctcaagcacggctacgaacagctgggcgtgcgcgccgtgccccacgccgtggcccgttacggcgcctacatcgctcccggagcgatcctcatgccctcgtacgtcaatatcggcgcctacgtggacacgggcacgatggtcgatacgtgggccacggtcggctcctgcgcgcagatcggcagacacgtccacctttcgggcggcgtgggcatcggcggagtgctggaacccgtacaggccgcacccgtaatcatcgaggacaactgcttcatcggttcgcgttcgatcgtggtcgaaggcgcgcacgtctgccgcgaggcggtgctcggctcgaacaccgtcatcacgggttcgacccacatcatcgacgtcaccggaccggagcccgtcacctacaaaggctacgttccgccgcgctcggtggtcgttcccggcagttaccgcaaacagttcccggcaggcgaatacagcatcacctgcgtcctgatcatcggccagcgcaaggaatcgaccgacaagaagacctcgctgaacgacgccctgcgcgacttcggcgtgtccgtctgatcgcgtcgccctcccgaaaatcccacccacgacaaaatgaataattcatgatctaccgtatcgacgaaaccacctcgaccaacgacgaggcccgcgacgcgaaataccgccacggcgacatcgtctgggccgaacggcagaccgccggacgcggccagcggggacatacgtggaccagccccgaaggtgaaaacctcaccttctcgatggtgctcgaaccccggttccttcccgtcggggagcagttcctgctctccgaagccgtgacgctggccctcacggacaccttcgccgcctacggcatcgacacccgcatcaagtggaccaacgacatctacgtcggagacaggaaactggtcggcatcctgatcgaacacaaccatgcgggagcctccctctcccgcacgatcgccggcatcggcatcaacgtcaaccagacggcgttcgaccccgcgctgcccaaccccgtctccctcgcgcaggccgggggccgcaagttcaaccgcagccggctgctcgaaacctttctggtccgctgcctgcggcgttacgcccagctcgaacggggcgaaaaggagaccctccagcacgcctaccgcgaacgaatgtaccggctgggcgaacagcacccctaccggctgcccgacggcacgctgtttcaggccgcgatcgaaggcgtgcttccctccggcgaactgatcctgcgccatgccgacggcacgcggcacgaatacctgttccgcgaaatcgaattcgtgatcgccggaaaacaagagaacgccggccccgcagagaaatgaatttccgccccgccgacggaatatgtttttaattgaagatgaatatactgatcgtttgcaatcacttctatccccacaaccgcatcgccgcattcaggctcaacgccttcgcccggtatttccgggaggcgggacattcggtgaccgtcataaccgaaggggaccgcgatgaaacggtgatgtggaacggctgcgaggtccactatgtaaaagacccggtgataacctcgtcgaaacaggaatccctcctgcagcgcagaaagaaatgggctttcagacgcatattgtcggccctgcagttccggctgttcctcgattacaaacggatatggcagttcaaagccagcaagaaggcgcgaaaactcgcaaaaagccggcggttcgatgtcgtattaagttcatacggtcatctctcttcgcaccggatcgcatacaggctgcacagaaaaacgccgttttactggatcgccgacatgcgcgacgagatgtcgaagtggccttggctcctgccgataaacagccggcggctcctcttctacgagcgcagaatactcaaggatgcggacctgatcctgtcggtatccgcaccccttgtcgaagatttcaaacaaatcggcggagggatcgacaaggttatcgagataacgaacgggtacgattacgaagaggtgcacgacgtctcttttcagcccgtctacaccatggcgttcatcggccatttttacaattcgatcactccggacaaatggttcggagccttctccgaactggttgccgagggagcgcttccctccgacagccgcatcctcatcataggaaacacctcgccgctggccgttcccgaaaacatcaggcagaacgtattccagatccggcaggtcgatcacgacgaagccatcaggaaatcgctggagaccgacacgctggtcgtcgtgcatcccaaaggacggaaaggcgtctacacgggcaagctgttcgactaccccgccaccaacaaaccgatcctcgccatctgcgatcccgacgacgtcatcgccgacctgctggaggagacgcgcgcgggtttcaccgcggacgaaacggacaacgagcaggtcaagcggatgatcctgcgctgctattccatctggaagaacaaggaggtgctgccccgcgactgggacaagatacggcagtacagccggaagaatcaggtcggccggctgctcgaatatctggcagggcaggaagccctgaaacagcactgacgccgatgccgggccggcccggcatcggaatctccgcccctaaccgaaatccggcgctccgctccggcagtcgaaaacgcgagacggcggccgaaaacgggaagccgcgaagcccttacgtccggttcggccgcaatttcgcgagcaccggtccgagcaactccatatagcggattccggcccgctgcgcaaacggcaggtacaacgacagatagacggcaaagcccaccgaaacgacgacaagatgatgcgtcatcccggtcagcaagacagccagcctggccgccgtgcaggccgcggccgatacgagcagcacgatcgtcagcatcctccacggcattagccccgcaagcgaagtgcccagcacgcgggcggtggtcgtcatcagcaggaacagacagaaaaacgtacagcccgtggcaatggccgcaatagcccaaagggacggaaacaccatgacgcaccagagttcgagaccgacgatgagcagagcggtgacaaggtgcgcacgggcaaaggcttttccccgccccagtgcaaacaggacgggggcgtagggcatgatacgcgccagattgacgagggtgacgatccggaacaggccggccgcttcccgatacccctccccatacagcagacagatgatctcaggagcgaaaacgcagcagaatacggacaacggataaatgatcgccgaggacttgaggacagccgcctgccacaaccggacaaactgcccgccgtcggccccttccaccgacatcctcgaaaattccggcagcagcacaccggccgcagcaccgataatcattccggccagcggaagttcgcggtatccgttggcgaacagggcgaaatcctcgacgcccaaatagcggcttacgaggaactggctcgccgaaccgatcacgaatccgtacatactcgaagcaaacaccggcatcgaaaaccggagcagctcccggaccgtcagccggctcttcaccggagatacattgcggaacggcacggacgacaacttcagcccggcaacgcatgtgaccagcgacgcgaggacgaaaccggcgaccgttcccgacacccccgcgtcaaaaaccacgaccggaagcacgacgcatgcaatcatgaaggcacggcttatcagcacatagccggccacgaggtgcgccttgccgtagacgaccagaatattctccccccccaagaccggcatcagcagcatgggcgccgcggcaaacagcctcaacggctcggccagcagcggattgccgagcactccggctatggcggcggcctgccaaagcaaaatgcacgaaaaaacggacgcaagaagcagaaacagcccgttcagtttgcggacgatatccctcccctcctccggcgacacgcgggcgaggtaataggagtacgctttgggaagtcccagcgaaaagacgaccagcagggtgttatagacgtacagcacctgactgtaagtaccgtactccgacgtggtcatgtaacggcagagcaccgcctgcatgaccagcgtcacgctcagcgacaacagattggccagcgccagccacaaggcctgcagcgtgcggcttctgccagcatttccgatcagaggggtggagttctgtttcatgcctcgtaccgtatggcccggcggcccgttttacaggctccagtatccgagcgatttgatccggcccttatagagtccgcgaatgtcgcccaacagggccgccccgcgggagatggagcggaaataagcgtcgtcgagtccgcggtactcgtcgtgcgccacggccacgacaatcaggtcgtaaggcggccggagggccggcaccggccgaattccgtacatggcataaaccttatcgggatcggcatggggatcggtcacatccacactcatcccctcacgctccagcagtccgaccatctcggcgatccgggagttgcgtatgtcgtcgatgttttccttgtaggtgacgcccatcagcaaagcccttgcgccgcggccgtcgcttcccatggccccaagcagcgaccgcaccacgtacgccgccatgccgtcgttcacggcgcagcccgaactcgtgacgggcatctcgacccccagctttgaagcggccgatacaagatagagcggatcgaccggaatgcaatgtccgccgcccagtcccggtctgtactttacgaaattccatttggacgaagccatatcgatgacctcgcccatatctattcccatgcgcgagaacagccgctgcaattcgttcatcagggcgatgttgacactgcgctgcacgttctccgtcatcttggccgcttcggccacccggatgcccgacgcccggcagagatcggccgccacgacctccgcgtatacgcgcgcgacctcgtccagcgcctgcccgtcgttcgccgacacgattttggcggtgttcgagaaggtatgctccgaatcgttgggattgatgcgttcgggcgagtagcccaccttgaaatccgcaccgagtttcagcccggagcctttttcgagcagcggcacgcacacctcctcggtgcatccggggtagaccgtggattcatacacgacataatcgccccgcttcagatagcgcgctacggtgcgcgtggcctcgacaagacaggtcagatcgggattcttgcgctcatcgaccggggtgagcaccgtgacgatataaaatgcggcccgcgacaactcctcttccaaagaggtgaaacggatgctcccgcagccggcgccgtacttttcacgcagtttttcgatacggcgggcatccatatcgtaccccaccacatcgaaacaccgggcaaacctcagcgctacgggcacgcctacatatcccagcccgatcacggccagcgacgtttcccgaccggtcagccgatcatatatcatcttcttcatagacacattcattgaccttgcgataactgcgtcccgactccgggcacacggccctgccggcttcgtcgaattccagcctgtgccccaagcggctcatccatccgaccacgcgtgcgggcaccccctcaacgagggcatgatcggggaccgaatgcgtaacgaccgccccgcgcccacgaaggcgtaccggccgatctcgaccccgcatacgacggtggcattggccccgacggtggcgccccggcgcacgcgggtggttttatactgctccctgcgcgagatctcgcttcggggattcttgacgttggtgaatacgcacgaagggcccagaaaaacataatcctcgcagatcacgcccgaatagatcgacacgttgttctgcacctttacctgacggcccagtatcacgtccgcggcgaccatgacattctgtccgatattgcacgccggtcccagcacggttcggtatttgtaggtaacggaatatgcaggaaagagtaaatatcatgtttacaggtatttaattccctgttctgcatctgttccgagcaataaaattgcagaatcgggcaggattaacggtgagttgtgttacttatccgttacctgcccgaaatgcttttgtttgcattaaggcgtttgttttcagtttgttgcatcggatttccgcataacaaataacttgacttaacgtttaacccatccacaaagttcaagttattatgcaacgcagcactttcaaagtccttttctatgtaaaaaggcagtcggaaaaacacggtcaggttcccgttatgggccgtatcaccatcaatggcacgatgtcgcagttcagcagcaaactctccgttcgttccagcctttgggatgccaaagccaacaaagcctccggcagaagtcttgaagcccagcgtctcaatgaaaagttggagaacatcaagaccaatatcggcaagcagtaccaacgtctctgcgaccgtgattcatacgttacggccgaaaaggtccgcaacgctttcctcggtatgggtgacgactgccgcctgctgttgcagaccttcgacgaatatcttgcagatttccgcaagcgcgtgggcaaagaccgcgcttattccagttatgaggactactgcaaacgccgccggcgtctggcctccttcctcgaatacgagtaccgcgtcaaggacattgcgttcaaagagctgaagcgggatttcatcgaaaagtttgtggtctacctctcctcggtacaagggatgcgctccgggacgatccattctacgctcaagaaattgaagctgatgacctacacggcgtataagaacggctggattgccgccgatcctttcgcagggttctatgtcaaagcggaatacgctgaacgacgttatctatccgcttcggaattgcaggccgtgatggatgtcaggctccccaactaccgaacgggcatcaaccgtgacgccttcgtcttctgcgcctttacgggtttgagccatgcggacgtagtgaaactcacccacgcggacatccatacggacgataacggggagcgctggattatcgacaggcgtcagaaaacaggtacgcagttccgtgtcaaactgcttcccgttgccgaaatgctttacgagcgttataaggatatgcatctctcaggcgaccgggtctttccgctcaaaggcacttataatacgctgaacatgtccttgcggcatgttgccagacatgccggtctgtcgttcaacccgacgattcatatggcgcgtcatacctttgccacgacggtcacgcttacgcaaggcgtgcctctggaaacggtcagcaagatgctggggcacaaacggatcaccacgacccaaatctatgctaagatcaccaatgataaaatcggacaggatatggcggcattaagcgagaaactcagcagcgtcttcaaggtcgcacggtaatggcctcctatcttacagctaattcgattcccgatcttacttcgtcaatagcagggtaattttcgatgtaagttttcccgccggcagggaatttatcgtcagagatggaaatatgcaaggccatgcgaatcgcccgaggggcgagccttgcatatttccatccccggcgttttgctggtcgcatgtagatttgcagcgtgatgtaatcacaggtaatttcgatatggagtcgcagtgaaccggggcttgtcgtaagctttgaggcttggcggtagatttggactgcgactccattaaccagagagaatggctgtttagaattgtaggtttgaagacctggtacatgtgatagcatacgactctcacaaaactaacaagttatgcactatttgtattatgtgggtctggatgtgtcgaaagagactttcgatgcgtctttggtcgccttcgaggatgcaaacgagatggctcaccgcaaattcgccaactcccgaaaagggatctgctcgtgtctgcactgggttgagaagcggcatggtattcggctcgacgatgtgattttctgcgccgaggatatggggagctacatatccgagatggcggtttgtgcttccgacaggacgctgaatttcaatttttcactgatctcgccgttggtaatcaagtattcgatgggtattgcccgtggcaaaacagacagagtggatgcccggcgtatcgccgagtatgcgatcactcactatcggaagatagccctttatctgccggcagagaaggaactgtgtcagttgcgcacatggctgatcttaagggctcatctggcaaaacaacgtgtagcgaaactggtgttgctcgaaaaattagactacaaagagaaattcgcggatgtatctattcaacgttccatgctccaggaggagatcgcgtatgcagaaactcatatgaaaaccatcgaacgggaaatgaaggaactgatagccgccgacagcaacatttgccggaactacaagctgctgaccagcatcaaaggtgtagggccgatcacggccattgtgatgctctgttcgacgcttaatttcaccaaaatcacagaccaccgcaagtttgcctgctattgcgggctggctccgttcgaacatagctccggcacaagcgttcgcgggggatgccacacatcgagcatggcgaatcgagacattaaagtacaactgaaccgcagtgcactgattgccatcaggtgtgatccgcaactaaaggcatattacgaacgcaaagtggctgaaggtaaacataaattcagcgtcctgaatgctgtgagggccaaaatcgccgccagatgctttgccgtcgtaaggcgtggaacaccatatgtagcgttgcagatataatccggcatacatatctgccattcgataagattttgagatcattcaaaatctcaaaatcttattgtcggaacagtccgtctaattgggagccgaacctactcataattaatgtattgtcatttccgtactccgcaaattaacgattctgactatgggatgcaaggctatacaagcgcttcgcggccttgcatcccataaccagaatcattttgctaaacgctacgacaaaaaatgacaatttccgggcatgaaactttttgcagcttttatttggttttatcttagaattctaccgtcggaaaaggcgacattctgcggctcctgacgatccggttctgatgttcagccgcgatcggcggatttcatcccgtcctgtgatctgccgtcgaaattcctctgctttttcaaaacggccgtcttttatttttcttttcatggagataattcagctcgtcgctataaatgtccatgacaaagcgcagcatattgtcgaccaaagccgtaagccttgtgctttcattccccaacaggtggaggatttccgacactttgcgcttggtttgcgcactgacataaatcgccgagcggttacggcaatctaccggagcgaagaaggtgcgttcgaaatccggcagtatgatctttttccgtcggaatccagcaggctcctttacagtagtcgtttgggtgtcgacatttgttttttcagcagttggtgccgatgtgtttccctcgggagcgtccgtattttcctcttccggctcgggaatcctacggacgactttcgagtccaaaggagcttgtccggcgatcatctgacgcatcaactcctcatcgacttcgatacggggatgcttcggaaggtttgttgcaggtttgtcagtttcttttaatgaatccatggtacaatgtttttgagattgaatattcgttatacggtcataaagctcgtgtgtttggttttatgttttaaaccattcaaaataccgttttctgtttaatacagtttatatcgggataatgaacggaataagaaaacttgcctttcatgctgcaagatacaaccgacagaaatacctcgattccgatgtccgctcacgaccgctccagtccgttcggcgggcttttttttcgtaccggacggttgtaatattgcaccgggaaagaccttgcctcggaagccgtagcggaggagttttcaaactttcgatagcagttctccggcgcggctttttcccatcgccagatgggagcgagctgtacctttgtatgccgaaaaacttttcggcatacaaaaggtgctcgctctgcgaggttgggtggcgttcccgagtcacgccacttaaactaccagattgatgacaaccacgaaaaagaggatcggacgcccgacaacgacagatcccagagtccacaggtataatttcaaactcacgacggaagagaatatccgctttaagcagatgctttgtaaggctggactggagcataatcggagccaatttatcgtcaaaagaatcttcaacgaggagttcgtcgttatcaaacgcgaccgaagatatagttcaaattattcaatttccctgttttgagttcttcaatctttggtcatacattgttaaacaattgaattgattttggagtatcaagcatgaagtaagacagagcttttattggttttagaaaccgtttatgacgttccgtccccatgcattgcatcttaaagctgaactgttcgtgaagtcgagtagagtccatgtccgcgacgatggttttacaagatgtaattttcacttaaagttttttattatggtttccagaggtatcgatatcagcaagagcagtttcgtagcggcttatccatcaacgaacggcaaccctactaagactttccctaacacaaccgcgagaatgcgtgagctcatcggtacgcttgctgtcgctgagcatcattgcgttatggaagctaccagcaattacggctgctgctgtacctgctacatcagaacggtattgccgtcagttttgccccccccaaaaagcagatcaagcatttttcccgaatgatgatgcccgttaccaaaaccgacgaaaaagacgcctacatgatcgccatgtacggggagaagatgaatcctcccatctacaaaatgccctcgcaggctacaatacggatccttaccaccgaagggtttacctactttgacaatgcaaagcaactatcccgcttcatcggaatatgtccaacctatcaacaatcaagaacatccgtaaatatcagagaacatatcaaccggaatgacgatgaacgtctgcgatctttactctatattgccttttggactgccttgcgttacaatagtcgggagtgttatatccgattaaaggcaaatgaaaaaccattcaaagtagctctgattgctgtgactaacaaactcgtcaggcctgttcttaccattactacaatcaactcaatatatcgatggatttgtcccggctaaaaaataatcttcggttctttttttatctttttacttaattatttgctttttaatacatttcctcataaatattcgttggctttgcctgcttccacttggaaaatacgaattttgaagaattgaagatttatcttaactttcgaaaaaatttcatgcgacgtgcgatttattccctccatcctccggtcgtttccgttcaatgtcatgttgtacttcgtcggattcttatctccgccgctccccgccgctgccgcctcctatgaccgaatccagaccctctcgatggacgaaggactcccgcacagcgacgtaaatgcgattacgcaagatcgtgacggctatctttggttcgcgacattcagcgggctgagtaaatacgacggatacagactccaaacctttcggaccgacaattccgacctcaccagcgaccggatactctgcctattcgtcgcccgggattcgtccctttatatcggaaccgaatccggagggctgaaccgttacgatccggtgtccgaaacgatatttccggtcgccgaagagccgacaacctctgcagaccaggtgatcaacaacattttcgaagatcgaaaaggtaccgtatgggtctgtcgaaacgacggattgggatacctcacactccgaggagcaaccacttatctgcatgtcaagaaccgatggagaggattctacatacagtgcggaaccgccttggattcttgcagactgctactgtcaaccgatgccggccccgtcatctataaccccgaaaccgaggagatacaaaatatcctccgggatgaaatcaaaacccgctgtttctcgatgcagtctttcgcagacggcaaaatcgcgctttccggaggatggggcgttcggatctatgatccgaaaaccgacgacctacagagaatctgcgacttctcatcccgggtcacgacgcaggacaatcacggaaacatctgggtcggaagtttcaaccggggactgtacaaatacgaccggaatggtattaagattgttcactaccaccccaaactccccattcctcatgccgtcaactcctttgagatcagcgcactgttcgaggatcgttccggggtgctttggatcggaacgatcggcggcggcttgagtaggctcaatgtcgtcgaaaaacatatcgaatgctataccgaagcgcagggcttgtgtgaaaatcggatcatcacgttcctcgaagcccgcgacggaatactttgggtcagcacacatggcggcatcaatctgtttaatcgaagttccgcaactttccgggagctgcgcataaatggattgccgagcatccaatttgcaaccgtatcagccttctttatggccgaaaacggcgacatctggctcggaacgtgggacaaaggattgtgggtcatcgacagccgggatatcgaccgggcgatacagaccggtcaggtccgggcccgacaactcaaacatccggtcatcgacggggaattgtccgtgttccgaatcgttgaagatcgcgacagacacctgtggatcagctcgaaccggggatgtttcgaatacattccatcccacggggatttcaaaaccgggcagtggatcaactatacccacaacggagatgatcccaattcgttatgctccaatttcacgacggacatctaccccgataccgtcaccgacaataagaccatctggatcggaacccgctcggggctgaaccgaatcgtattcgatgccgacggcaaggcgaactgccagcgaatcgaactcgccgctacgaacgcccgtgaacggaaggtgtgtagttccgatgccttcatctcgacgattcactgtgaccggaaagagggggggggtctttggatcgcaacgatcggcgaaggtctcttccttatgaccgaaggtcgttgcggcgggaaaacgccccgtttcagctgtttcgacacatccaactcccggttcttcaataacgaactggagagcctgcaggaggacgaccacggagccttctggatcggcggctacggaatcacccgcttcgatccccgggatcactcgatccggcattttacggtaaaggaccaattgcagagcaactccttcaaaatctgggcatcgtacagactccgcaacggcgagatggttttcggaggcgtaaaggggttcaacattttccatccggacagcatcaccgacaacgacatccgcccgcgcacggccatctcccggcttaagattcggaatcagaccgtctcggccggagattccgtttgcggacgcgtcgtcctgccgcgcgccatcaaccggctcaacaaactcgacctctcctacaactgcaacaacctcaccttcgaattttcggccttcgcctacgtcgatcccaagtacaatacctataaatatagaatggagaatttcgacaccgactggaactacaccagcggactgtcgcctcaagccgtctataccaacttgcgcccgggcagctaccggctggtcgtatatgcctcgaacgaagacggatactggtctcaggcccctgcggtgctcgaaatcacgatacgtccgcccgtctatgccacacgcttggcctggctttgctacattgcgctaaccatcctttttctctacagatggcaccgccgttcactgcgaaaactacaggagcgccaccagatagagctcgaacgcaacaaatactatgaagagcagaagagcagcgccaacatgctacagttctataccgatatcgcccacgagctcaagacgccgctctcgctgattacagccccggtcgaagagctgctcttgaatccgcatatcgggaaaacgacgcgcaacagactggaactcgtcaaccgcaatgcgggggcattgaagaccctgctggaacaaatcctcgacttgcgcaaatacgaaagccacaaaatggaactcgcggctgtgcaaaccgatgcgtcggaattcctccgcggtatagccgaactgttcaagccgttggccgaccaacttcagatacagttctcgcaggagattccgaacgatccgctcatactctggatcgatcgtcggaaaatggagatcgttatcgctaatttgctctacaacgcattcaaatacagtcggaaaagttcagggaaagtgaatctcgtctgtgaagagcaacagctgtcggtaaccatttcggtggaagataatggaatcggaatagcccgggatgaacagtcccggatcttcgaacgtttttaccaggctcgaaacaacaactcgccgcaaaaaagcatcggcatcggactctccctggtcaagcatatcgttactctgcatcatggagaaattgaagtcgcatccgaattgaacgtcggttcgctcttccgggtccggatcccgaagggatgtgcgcacctcgctcccgaacagatcaaagattccgacaaggtcccgggtcggccatttcagaatctcccgatagggatggattccgcgctgtcggacttcggtgacgatcaattcgaatcggagatggcggcggaaaccgcaatcgggaacgatcgtggaatgcagtgcgggctcctggaagaaaatacgcgccacggagcagctgcatctgatggaaaaagagtttcgattctcgtggccgaggacaataccgccttgcgggattatcttcgaagcgcgctggagaaccgatacaacgtctcgacggcacgaaatggagaggaggcttattgtcaggcaatcaatgaacagcccgatctggtgcttacagacatcgtcatgccgggaatgtcgggaatcgaactttgccgcaaaatcaaggagaattcccggacttcggcaatcggggtcattctacttacggcccacaatctgcagaactacgaagtatccggataccgtgtcggagccgacgcttatgtagcaaaaccgttctcccttgaagtgctcttctcccgtatcgacaaccttgttgcccgacagaataaaatccacaaaaacagtcaacctataaaggagattcccatttcagaagtcgctgtggagaaatccgaagatctcttccttgtcaaatgtaccgaaaccatcgagaccgaaatagccgatccgcgatttgacgtcctacagctttgccgcaaaatcggcgtgtcacgatcgcagctctaccggcgtattcttgccctcacggggttgacgcccatacaattcattcgcagcatccggctaaagcacgctgcatcattccttgcccaagacggaacacttcctgtcaatgaggtaatgtatcgcgtagggtacaccaatctcagccacttcgccaaaatcttccatgaggaattcggactctaccccaaggagttcgccctccggaaccggagcaaaacgggaaaagtggactccgcgtcggaaatcttctccaaaaacgagcccgagacgcagaaatgaccccggacgattttctcaaataaattaaaaaatacttttcccgtcatccgtgtattttgagacatttgcgttgattttttaggtttttaatagtttcctttgcatcagctgcaccaaatgcggcaatttgaaaacctaaactaaatcaacgcaaatgaatcattttctctctccatgctctatccgccggggtcggatcatccgatccgcctcctttgggcccggaagtctcaccgggcagcatccgaatattccgaggaatacatatcttgagaatatgattccatgattcggacagggatgccggaattcttcatgcaagaaagcactccggattccctgaccgaaaaaatacctacattccaaaaactgcgaaccatgaaacagctattctttcatctcgtgccggttcttgcctttgggttggtactggctgcttgtgacaacgattcggacgagtggacacaaccttacgaattcgcttggagctacggcgcggaatcacaattcagcgtcgggaaacccgctacatttacggacctttcgctcggggtcgaaacccgcgagtggagtttcgaagacgcaacacctgcgacctccacggatcccgaaccgagcgtcgtattcaattcgaaaggcataaagacggtaacccttacaatccattttctcaacggtcaggtgcagtccgaatcgttcgacattgaggtattttacccgctttcggctcggatcaaagccttggaacttacaccgaaaggctgtattcggctcgatacccccgtctcgttcggccttaccgaagtcgagggtaatccgacatcctaccaatggacattcgaaggcggtacgccttcctcgtcgactgatcccgccccagtggtcacctggacttcggccaacaaaaacggagcccgaatctcctgcagactcactcgggccgacgacggaatgacaactaccgtcgaacagacttttattgtcggaaactatccaatgctgcaccccattcccgagaaggattatgatccctggcggttcgaactttcgtccattggaaaatggacgctctggaacacgaccacttccgcggatgatctgacgactaacacctccatcgtcagcggcggggccgatggctcgaagcaggccctcaaggtaacgctcaaaccgggagtcatctatcagttgttcacgcgagacaactgggtttgcaacgcccaactcgttgccggacaaaaatatgaagtctccttctggcagaaaacggatgccgcggagggttcgcttatcgtcttgacgggcatctataacaatctgccctcctggtcttggaatgaatacctccaggtacttgcgagtgaccactggagcatctacttccccgatattcctttcgaggaacaggtggaagagatgttcggaatttggagtaatatcgaatatccgcttaccgaaacgatcacactcccggcatctccggagctgatgccttccgcagagtggaaacaggtccggttcgaattcacggccactagcgccaaatacgaatcgttgctgaacacctatccccaattcgctcttctgtcagccggctccgctgatgtaaactggtatttggacgacatacaaatcaatcttatcgaagaataacccgaataaactattcgctatgaaacgattcgttttcttactggccggcttgctgctcattgcttcgagtctccgggcccagacctccgtcagcggtacgattacctccccggacggaaagcctgtcgccggcgcgtcgataatcatcgaaggcagcaccgtcggtgccacgtccgatgccaagggtttctatcggatcaaagtccgttcatccaaagatattctcgtcttcaacttcctcgggtaccgggaggttcgcgaatccgtcgggcagcgatccctgatcgatgtcgtactctcaccctccgaccttcagatagacgacgtcgttgtagtcggttacggtgccctacggaaaaaggacatgaccggagctgttgcctcgatcaaggccgatgccttcgaaaaccgggtacttttctccgttgacgacgctttagccggcggagtggccggtctgatggtcaactcctcatccggaaaacccggctcggagtcgagcatgcttatccgcggtgcaaactccctgaccggctccactgccccgctgattgtccttgacggattcccgctcttcgatgtcagcacctccaccgggggtggcatagacggatatgacaccggcatgtcctcgctctcgatgataaaccccgacgatatcgcttcgatcgaagtgctaaaagacgcctcggcaacggcaatatatggtaaccgcggagccaacggagtcattctcattaccaccaaacgaggccggggcgacagcggaaagatccaatacaacacctacttcggatttcaacagatgaataagcggtatgacatgatggattttcgccagtacgccgcctatcaggttgatcgaaactcctcgaacaaccacctgttcacggaccctatcaccatgcaaccccgcacaatcggagacgtacagtcgcgggactggcaggatgaaatctttcgtaccggatttattcaaaaccattcgctatctatttcacactctactgaaaaaacgagtatgttcgtctccggttcctacatgcagaacaaatcggtcctcatcgccacgaattggcagaaactcacggctaaagctacgatcgaccaccgattcacggattttatacgcacgggtgtcgatatcggctataaccgaatcgtcgacgacggagtgccgaccggcggcgaaggcacgtcccaggttgcaggcgtcatcacttcggccctgacggctcttcctttcgaattcgacgaaacgactcaggcctatttccgccgtgcaggcgtctcgcagtcctcgctcgactcttatatcgacaactatcacgggaatccggtcaacatcgccaatgagaccgaactcaccaaacgcatcaaccgaatgatgctcaatgcctatgtcgaggccgacatccttaagaatctgaccttgcgcatcacggcaggatatgacagttattcgctcaaagaccgccagttctatcccacctcgacgccccgcggctacttttacaaggggcagggtatcatcggcagttctgaatccggaagttggatcaacgaaaacacgctcacctggaagcccgtattcgggaaacaccgtctcaatgtcctcgtcggcatgactgaacaaggatacacgaacttctacgatcgcagcgaaaccactcaatacgaatacgaggatctcggatcgaataatgcccagatggctaaagttttcaacgtctactccagcaaggagcaggtccggtatgtctcgctcatcggtcgaattaactactcatacgacaaccgttacattgccactttcaccctccgccgcgatgctacctcgcgcttcatcaacgacaagtggggtacgtttctctccggtgcattagcctggaacatcgacagcgaaagattcatgcagaatcaaaataccgtcagcgccctcaaactgcgtctgagtctgggcgaggttggcaactcaaatgtccccacctcgggctcctactcgcagctctacggaacgaactactccttcggaaccattgagaccatcgggcagtcttctttgtctattgctaatgaaaacctctcctgggagaccactcgcgaagtgaacgcaggattggaggtcgggttatggaacgaccggctgaaattcacggcagacttctatgacaaggttacccgggacctgttgcttgaggctcccgttgttaacatcgtcggattcgacaaggcatggcagaatatcggcaaaatgcgcaaccgcggtatcgagttgagcctgaacgcccagttgatcaaccacaagaatttcaaatggaatttcttcgccaacttcgcccgcaacaagaccaaaattcttgaactcggccagggcggagccccgatcctgctgggtgtcacttgtctgagcggtcagaatgccgtcatcctgcaagagggcggagagatcggagacatatacggatacgtcaccaaaggtgtctatggactaaatgatttcgaaatcgacggaataacgccgaagcctgatgtcgccgtcgaaaccggagccgaaaaacccggggccatgcgcttcgccgacctgtacaaggacgaaaagattacatccgacgaccggaccgtaatcggaaactcgacacccgatttcttcggagccttcggcacgaacttcacctggaagaacctcgacctcaacctctcgttccaatattcatacggaggcaacgtctacaacgcaaactacaatcagctcgcagcgttcaccggaaccacgaacaaccaaatggcattcttcgaggagcgttggtcgccccggaaccttgcaagcacgcaatactccacgatgacgaacggagcggtctgctcggcattcgtcgaagatgcctcgtttctgcggctccgctctgcacggatcagctacacctgtccgcgcaaatggttcggccctaacagccacatcggctcgatcaagttctatatcgccggagaaaacctcttcgtcctcactcgatactcgggctacgaccccgaggtgtactccaaccaaggttccagcagcatgagcaatatcctcacgtcgggcttcgactacggctgcttcccccgcccgcgcaccttcaccgcaggtattaacattctgttccagtaaaacgatctccatcatgaaaaagttcatcacctccgcatactcgcgactcggccgctttgtcgttatcgcggttgcaggctgtatcttctcggcgtgcagcgacttcctcgatgtccccctcgaaagtaccgtggcgacctccaacttttacaagactgccgaagagttcgacatgggactcacgggcgtttataacatgctgctctcggccgaatgggccaatggcgaccgatacgggtcctattttcagggtttcctcatccttgggcgcgtcggaaccgatgagatgatcattccgaccaacatcgacggaaacgagacagaactctgcaactacacctacaccccttcgcatcgctacatctcccgaacatggtatgtccagtatcgcgggatacaacgcgcctgcgttatcatagaccgtctgactgacaccgatatcggcaatgaaagcgagaagaaacggattctcggcgaagcctatttcctgcgggccttctactacttccatctggtaaggcttttcggtgaggtgccgatcatcaaccacgaagttaccgatctcacaatggtgcagactgaaaagtcttccgtggcccaagtctacgaacaaatcgtcagtgatctgaaactagccatcgggaaccttccggtgtcgaatgcgaacggccgggctcactactacgcagccaaagccctgctcggcaaggtctatttgcaaatggccggcgaacctttggaagactccgaagctgcggctttagccgaagtcgaactcaacgaggttatccagagcggtcgttttgagctcgtgaaggattatttcagtctgttcgatgcgtcgaacgaatacagttccgaatacctattcgatgtcgagtttgccaacaacggtacaaccacctacggaggccaggtcggaactatcgatggtgttcagacccccaataacctctactggtctgcggtatggagtacccaggagttctatgaaacgtacgatcccgccgacctgcgccgcgacaacatcgctcgcttcaaatatgtttacgacgacaatcagaatctcgtcaaggaggatctcagttccgaaccgatctactacgcctacaagttccgccatgccctgactgaggagggacgggggccgggatgggcaaactgggcaaatccgatcaactttccgatcatccgttatgccgacgtgttgctgatgtatgccgaagccgtttggcgggctcacgaagttccttcgcccgaagcgctcgaatatgtcaaccaggtgcgacgccgtggtttcggagtcgatatcaagactccgaatgaagcggttgatctgaagatgatggacggcgacaagttcgccgaggccctgctcgccgagcgtagtttcgaactctgcttcgagggacagcgctggtacgatctggtccgcttcggaaaacttgaggaaggcgtgaagaaactggccaagtattcgagcgtggcgacctcccaggcgcagaacttccaacccaaacacgtaatcttccccattccgcaggatgttatcgacgcctcgaatgggaagatcgaacagaatccgctttggaaataaaacccgatcctccattcaaattacgaaaccatgaaaacacatgcattatacgtcgctggtgccgctctgatgatcgcactgtcgtcctgtgaccgcgatcttgacctcgcgcatgcctacaacaacggttccagttcgaaaccctacgaattcgatgcggatttcaatccggatgattacaccgattttggaacgttcgtcgtcggtgaccgcaacatctgttggcaggatccccacattccccggtatatgctctggcttgacggaaagatctccgtcgggaaatacgatgattcgggactgtttacgacctactggtctgcggacaattccctgcgacaggtatccgccagtccctggctcgatgagaacgtcaatgccttgacctccgatatggaggtctttggcaagtgcatcgaacccgtatccggattttacgacggcggcgcatggttcatcggcgtgcataaactcatggacggtcggttggccggattcttccatgccgagagccattggcccggagtctccgccgcctataagtccattggcgtcacctattcctcggacaacggactgacctgggaaacgggcagacggatcctttccggaaccgaccccaaacccgaaaatcccgccgggcagggtgagtcctacggcttgggagacgggtgcgtagtttggaacgacgcgcgcaaagtctggatatgctactactcgggctattgcgatgaccccggaaactacatgatcacgatggcctgttcggaggatccggccggagctgccggaacctggaaaaaatgggatggcaaagcattcaccgtcgaaggctgcaacgggcagacacaactcggcggcgcaaacatcaagatcgccaatctcgatacctatgccggcggaaatccgtcggtcatgtggaaccactacataggcaaatgggtgatggtctatcattcgtggagccgacgcatttgtctttcgacgagtgccgacggtattgcgtgggaggcccctatatccctcaatctgggtgaggaggaggccatgtatcccaacctgatcagtgaagagggagatcaaaccgggggacaggctgtccgcatgtattatgctgcagacatgaatgatctcggacaacgcagtctcgcatggagaaaggtcgtattttattgatgtttggaatgtcgatccgaaaattcatcattctttccgcgctgatcgtttccggatgcgaaatgcatccggaaacgattgccatcgacttcgattccggaacggaggactatacgcctcttgtacgcaagatccttgcggagcatccagccggtgaggtcacaatccgattcggagcggggacgttcgacttctatcccgaacaggcggccggcagctatctctgcgtttcgaacaacgacaacggctataaacgctgcgcttttctgctcgaggagatgcgacgtgtacggatcgaaggggctggagaaaaaacccagttgagatttcacggcgcaatcgttccgttccgcgtcgctcgatgcgaacagatcgttttcgaggctttcacgatcgattgcgacgcatcgttcatcttcgaaggcctcgtcgttggtaacgatcctcgtacgcacagcatcacgctccgtccgctcgatccggaacgtttcgagatccggagcggggaaccctggtttacgggctacgactgggcgagtccgttcggtgaaaatattttgttcgatcccggaacccgttcgccctactatcaggccgaacagtacgaacacgatcaaaaaaaaacgctgcaggccgaatggatcggcgattcgcttgtccgtctgagcggctactcgtctcgggagctgcctcctgtgggaagcgtctatacggataaaggcccccattcgactaaccgccgctatccgggattctcgttttacaagtcggccggtgttgaagtccggaacgtcacgcttcacgattcgggcggcatggcgctgatcgccgagaactgtcgcgacgtcgtctgctcgcaataccgggttgaagtcccgcctcaaagcggccggatggtctctgcatcggccgatgccactcatttcgtcggatgttcgggaaaaatagtgctccgggcctgccggttcgaaagcatgctcgacgatgccacgaacattcacggtgtttacatgacggttgtggatcggttttccgggaaccggtttggggccagttttgggcactttcagcaggagggtttcgattttgccgaacaaggtgattcgctcgtcttcatcgatcgtgccgatctgggggtactcggctgcggacgagtcgaggaggtgaaccacgtgaatgaaaactattacatcattcgaaccggattcgacctgagtgcaattccggactcggtgcacattgccgtcgggaaccgcgcggccgatgccgatgtcgaaatatcggaatgcacggttcgttataatcgcgcccggagttttctgctttcgactccgggcgacgtatgcgtcgaaaacagtgatctttcttcaatgatggccggaatacgcatttgcggtgacgccaactactggttcgaatcgggacgtacgcgcaacgtcgtgatccgtaacaaccgattcggcacgatggctaccggcggccggtctccccaggccgttctgcagatcgaccccgttatttcgcatgatgcccggagcggggggactccgtatcacggatgtatccgtttcgaaggaaacctcgtggagtcgttcgacaaccagttgatttatgctctctcggtcgattcgctcgtcatcagcaggaaccggttcgtcgattcccgccggtttgagccccggttcgccggtctctcggtcatcgatgcccagcactgccgcagcgtcacagtccggaacaatgacttctccgggtggaaggaaaattcgacaatcagtctggtcgactgttccgagcattgtttggagggtgaagagatgcctcgaatggttgagaatcctaatccgtacttctatgaaaattagtcgatacatcctcccgattctcgcgaccgcatggatcggaagcgtttcatcccggccgttcggagatacgcttcggatgcgagatttcggtgcgttgcccgattcgggagaggatgcttccgaagccttgcgaaaagccgtcgctaccatcggaaagcgggaaatccccaccgtattgtgtttcgagtcggggcggtacgatttccatgcccctgaggggcaggacgaccgggtgaacatcgtggcaagactccgcggcattcgggatttaataatcgacggcggtggcgctgaattcatcgcacacgggcgtttgatgcttttcttggctgaggagtgcgaaagactgacgattcgcaatttctcgctcgactgggaacgcccctatatcacacaggcttcgatcgttgctcttggggacggccatgttgacctggctatcgatcggaaacgttatccctaccacatcgaaaaggggcggatccgctttacggatgagacttgggagcgtgaaatcgatcccgaaagttattctacggcttacgatccgcaaagcggtgcggtgctttacggtacccgggactgtcctctctcggaccgcaatgcagtcttccgcggcgaagcccgtgaaatcgctccggacacggtccgcttcttcgggacggtcgaccgtcccctgccgatcggtacggaactcgctctttaccatgggcggtatttgtccaacgctatgacggtggtgaactgcaggaatgtctgcttcgaaaaaatcgacctgcgccattctcccggaatgggcgtttacggactccgcagcgagaacatcctgctcaaggcggtttgtacggtcgtcaatcgttccgaaaagcgtcggttcagctgtgctgccgatgcgttccactttaccaactgccgcggattgatcgaacttgacggctgcaactgcaacggacagggtgacgatgccttgaacatacacggcatctatgcccggatagtcgctgtttcgaaagaccggaaacagattgagttgttcggagtccggttcccggcagaacgggtgttcaaagccgatgatgagatctggccgattgtacgaacgaccggatctcggggggcccggaaccgcattgaacgcattgtcaggaaaagcagcaagcggcttgttgtcgccttgcgtgagccgctcgataaaacattcagggaagacgattttatcgaaaacgcctcgtggtatgccaacgtatcgattcacgattgctacttcgggcgagccaaccgcgcccgcggcatcttgctcaccactcccggaaaggttgtcgtacataacaaccgcttcatgacggccggaacggcaattctcatcgaaggagataccgactactggttcgaatcgggcgccgtgtgcgacatggatatccatgacaaccttttcgagaactgcggcacttcggcttcgaacaacggcggatccggctggggcgaagccctcatcagcatcactccctctttccgtccggcagacgaaagcagcccggtctatcatcgcaatatccggatccgcaacaaccgcattctcacttatgaccgtccgctgctccacgcccgatcggttgagggactgcagttcgtggcaaactgtgtcgaacaaacatacgatttccccgccacagccgcacaacgccaatcattctgccttgaggggtgtcgaaatgtgcgcatcgccgagaaccggtttatcggctacggcaaacccgatttcgaactgatccatatgaacccaaataatatctgtcatgaaaaagcgaaataagaaaatcattgctgcactgagcgcaatcttcgggctgcttgtcatcggggcattgtgctggagtttcgtactctgttacaggacactccatccgccccgcctgaccgatctcagctggctcacccggcaatatcctcataccacagaatggctcgacagcatccgcagcaacggattgctgcatgatatcgtacggttgaatgccgacggagagcgactccatgcccggtggctatgggctccggagcctaccgaaaagaccgccgtgctctttcatggctatcagggttcggcggaaaccatgctcatgatcggctatctcttcaaccatgatttcggattcaatgttctgattcccgatctgcgcggtcatgggcaaagcgaaccttcggccatcagcatggggtggactgaacgaacggaagtggtggactggatccgaacggcagattcgcttttcggcggcaatacgcagatcgtcctgtacggcgtttcgatgggtgccgccactacgatgatcgccgctgccgaagagtcgctgcccgcatgtgtccgctgtgccgtggaggattgtggctacacttcaacccgggatatctttgccgattcttgggagaagcagtgccgactgccgctctttccgctcttccatctatcggacctttggtgccggatcctctacggatggagtttcgcaaaggcttctccgctcgatgccgtgcaccgatgcaggttgcctatgttgttcattcacggcgacaaggactcggtcgtccctgtggaaatggttcaccggctgtacgaagcgaaaatcggagacaaggaactctggatactttccggcgtcgatcatggtgccgcctatctccacgatccgcagatatatgcgcagcgcgtccgcacattcgtggagcactggttcgaatgccccgccatccttgaacaatgaaatgacaatgaaaaaactgctgttccttcttttttgcaccgggctcggacttcctgttgcaggacaacgctggcagattgatccggacggaggcatcgtctggagacccggaaacgatacgccccacagggatcatctcgaaatgaccggcgagcagatctcgacggttctccgctgggttgtggatgaccgaggagcctttcgcgtcgaacgttcgctgatcttcccgctgttacgtgtccgtcccaatgatacgcatgccagtctgatgtgccgcgtggccacggatattccctcgctgttggccgtgaatacctccgcctcgggtttcaatgcttcggccctgcagttcgaacgggtcgaaaagatcgtcatagacggtacggtccgggtctttagtcaatggagttttaatgccgtgggggccggatacgaggaggtggagcatccggctccggtcttggccatggagcgcacgatctttccttcgccgacacaacccgccctctgtgaacggtatcttatccgcaatatcggttcgcaaacgctggagatttccatcccagagttttcgcaaatcgtgacgaccccttcggaacgaggcattacgggcggctacgtcattcgggccgaattgctcgatgccggaatccgcatactgcagcccggagattcgaccgtggtggatgccctcttccgggcttgtcgagtcggagagacacttccgcccgcagatgtcggagccgaactccgctctcgtagggagttcgtttctgcaatctcggacaaactggtcctggagaccccggatccggtagtcgacacggaattccgctttgccaagatccgggctgccgaaagcattatcaagacccgcggcggctacatgcatgctccgggcggcgaatgttactacgcggctatttgggccaacgatcaggccgaatacgtcaacccttttttcccaatgctcggatacgacatcgggaatcgatcggcactcaacgcattccgccacttcgcccgtttcatgaatgctgaataccggcctattcctagttcgatcatcgccgagggcgacgacatctggaacggggccggcgatcgaggcgatgccgcgatgatcgcatacggcgctgcgcgctacgccttggcccgcggggaacggaacgaagccgaagagctgtggcctttggtggaatggtgtctcgaatactgccggcgcaaactcactcccgaaggggtcgtcgcttccgataccgatgaattggagggccgattccctgccggcaaggccaatctctgtacatcgacactctattatgatgccttgcggtcggccgtctatctcggacaggagctcggatgtccgcgtaaaacgctgcgagtttacaaacggcagacttcggagctcgctgaggcgattgaatgccatttcggcgccacggttgccggatacgaaacttaccgctatttcgatggctgtacgaaactccgctcgtggatatgcatgccgttgatcgccgggttgcaaaaccgcagcgaagggactgttcgggcgctgctcggaaaagagctgatgaccgaaaacggcctcctcaccgaacagggcagttcgaccttctgggaccgttcgaccctttatgctctgcggggaatctacatcgccgggcaggccgaccgtgcaacggaattcctcagtcattatgcccggcgcagactcctgggcgatcatgttccctatccgatcgaagcatggcccgagggctctcaacgccacttggccgccgaaagcgggcttttctgccgcgttatcaccgagggattgttcgggattcgccccaccgggttcaggagcttcgatcttaccccttcaatgccttccggatggaatcgcatggcgttgcggcacattcgggcctttgaaaacaacttcgaccttgtcatcgagaaacagccggacgggtttctgcgagtcacgcttgcgatttcgggatgcaatccccgagctttccggcttcgacagggagcgtccctgcgtatcaaacttccataatttacaatatcctgatgaaaaaactgcttcacaccctgttgctgtttgctgtcgggctctttgcagcctgtcaggccccgacatccggtggcgatgtctacttgaatgatttccttgacgacctgactgcacaaaccgacgcaggaccggccattcgggccgccttgtcccattgtgcccggatccgggccgcacggcttattcttccgggtggagaactccggatacgacccgatctggcggtcgaaaagtaccagttcatcagcaacaacgacgaaggtttgaaacggattgcctttgatttggtcggcctgcaagatttcaccattgaaggtgctgacacgaaactccttttcacaggtttcgtttcaccgttcaacctcgaacgttgccgcaacatcacgatccgcaatctttcgatcgactttacccgcacgtttcactccgaaggtaccgtacgggcggccggaaacggatggctcgatttggagttcccggacaaataccgatgcgatctgacggacggatgcttgcgtttcctcgatgacgaaggtcgtgtctacccctattccagtttgttggagttcgatacccaacgatgcgaaccggctttccacgtcgacgactactggctcccggcccataccattcctgctgaacggcgtcctaacggatggattcggattttccgcagtgatttgaaggccgcgatcgggaatacgatggtcttcggggccgcccgacggctcaatcccgggatcaccgtttccgattcgcagggtattgcaatcctcgacgtgaagctccatcactgcggagggatgggggtcatcgcacaacgcagccgcgacatcggaattgaacggatggaagttgttccggctcccggcaaaaaacgcatgatcagcatcacggccgacgccacgcatttctccaattgcgggggacagatccgtctaatcgactgtacgttcgaaaatcagaaggatgatgcctccaatattcatggactatatatgcccgtcgatacgattttcgatcgggagcggatttgggttcgctggggacacagcgggcaatacggcacagatttcctcgtcccggggatggcggtggaaattgtcgacaaccacacgcttgaagcctatgcccggcggattgttgctaaggtcgaacggttcaacaaggagtattctgcggtaaccttcactgaacccttacccgagaacattcgtcccggccatctgattgcagccgacgaacccggtcccgatgttcacatcagcggttgccggatgtcgggaaaccgcgcccgcggtttgctgattggttcccgcggacgggttatcatcgaaaacaactatttccatatcgccggagcctcgatcctctttgagggcgacggtaacttctggttcgaacaatccggtgtccgtgacgtaacaattcgcaacaacatcttcgcaaacggcaattatggaagccggggatggggaagtgcctgcattgctgtcggcagcggaatttcccagcggcagacaagtcgttatcaccgcaatattcaggtcgatggaaatctgttccgagtattcgatccccgcattgttaatctgtattgcgtagacggattccaattctctgcgagcaatcgcatcgtgcgaacgtcagactatcctgcgacattcgatccgaagctccatttcgtattcgaccaatgcgatcacatcgagattccacgacagattgaaatggctgaacagcgttgaaagagtccttctaaaaaatcgatatcagatgggagttgcaacaataaaagtttgcaactcctattttcccatactttggaataaaagtccgcaagacacagctaaagaagttggatacattattctcatgtaggatttcattccgtcgtgaataatataacataggccgtagcaaaaacagaggaggatactcatcatatttccatggagcactataaaatctgagcgtagcaggttgaagataaactggtggttacatcttcattcaacttttttaggggggctggcatttatgtcgaatgcgcactctctaaattgcctcattatctggattttattccatattgtcacatatcccaataactccggcttagcacctgactgaaatgaaacaatagaaaaatattgggtcatcaaccggagtgaatattatagacagcaagtttttcaggctgtagaaaatgataaggcgcaatttgcctccgataatgatacagccattattcaatatattgagtaaatcggctaattgatgtccaagttaatttcctgcttgtgttaccaataatacgacgcagatcttccaattttatagcctcgaaaatatcttccgatgtaaaagtatttccattccagactttttatttcaaacgttatatcaactatatttagccgctgctccgatctgaaaaaatacacttcatacgttggcaaaagtaagacgacgtctgatgaatatccgagatgaatcagtaaagtgattccaggaatgaaatcgctactatggactgtcattgcattgagggaattcgagatgaaaatggtctggttgaaagtaaaccatcctgtagtcatggactgcggaagaaaatcgcaattccgaaatctccgatttattgggcaaagcaatttacacctacagatcttatgggagatagcagttccgatgcaggaactcggtgccggacgatgtcttgacggttcgcagacttctttggatctgtttgtagaagggttcacatggatgatcaacatctagataaatgattccgataagtataagcatgtcgtactgaaccgcaaacacgctattgtttttagcaaatttgctcgatcggaaaatttttcgtagcttgcagtaggttatttgaaatgcggcatttagacgcaataagctgaaaataaatcgttaccttcgcgttacctattttcctatataaaagttgtaacgacccgataaatcgaatcgttacagttttttaatcccgttccaagcgggccccggccattatatgcgagaaatgccagatcctgcaacccggccctatgaccgccccgtcgtctacgaacgaagaggggtggatgaacgtttcactcatggtatctgctttcgttatcggcaaaatagcggcatacggcatccgtcacacgctccacctcggcgtcggtcagttcgctgtccatcggaagcgacagcaccgccgccggcagcgctgcggcatggcgcatcgcgggatcgcagatgcaggcgtcgcggtatgcgggctgttcgtacagggttccgggataatagaccatggagggtatgccctccttggcgagtgcggcccgaagtccgtcgcggcaggccggaggcaccttgacggtgtactggtggtagacgtgggtggcgtagggcgtctcgaccggggtcacgaccggcgtcagaccgcccaaacgctccgtgtagcgcgctgccacgctccggcgggcggcgatccatgtgtcgaggtgcggcagcttgacccgcagtacggcggcctgcagcgtgtcgagccgcgaattcattccgaccagccggctgtcgtatttggggaaccaaccgtgactgcccagcgcccggatgcgggccgccagcccgtcgtcgtcggtgaacaccgcgccgccgtcgccgtaacagcccagtaccttggagggaaagaacgacgtgcacccgatctccccgatcgtacccgcataacggcgcgcgccgtcggacatgcggcatacggctcccagcgactgggcgttgtcctcgatcaccttcaggccgtgctccttcgcaacggccgtgagcgcagccatatcgcacggctgcccgaacagatggacggggatgacgacacgggtacgctccgacaccagccgggcgacgctcgccgggtcgatattgaaagtgcggggatcgacgtcggcgaagaccggaacgccgcccagcagcagcaccgtttcggccacggccgcgaatgcaaaggccgggacgatgacttcgtcgccccgctgcagccctacggccagcagtgacagcagaagcgcgtccgtaccgttgccgcaggcgatgcagtgccgcacttcgagccgccgggccagctcctcttcgaacagcccgaccgcaggacccttgatgaaggcggtctcggcaatgacatcgccgatggcgcggtccacttcatcgcggatgccgagatactgcctatgtagatccaccattttcatcgctcccgttcttttttcgcatcacccctgcaaattccgcagcagcggatgatagtcgcccgtcaggccgaccgccgcactcttccgcagcatatcgagcgtatggacggcacacgccgtatcttcgaccgcaaaaccccggccggcaagtatccgctcgtagctcaacgtgtggaggtccgtaaacccgttcgtaaagtcgaactcctcgccgtttataacaagatgtctgtacggagacatgggattatcgttcggcgcaggacgatgggcggcgttgacgctcagaaaatacctgacgcgggctctcttcaactgcaaaaagccggccgaacactccggcgacgaatggtgcagcaccaccttctcgaccggaccgaatatccagtgcagcatgtcgataaaatggatgccgatattggccgccacgccgccgctcttgcacgggtcgcccttccacgaagcggcataccagcttcctctgggagtaatgtaggtaaggtctacatcataaattgtcgggggggggcgcagtcgaccatccgtttcagccgctctatttccggatgaaggcgcagctgcaatatggggaatacgcgcctgcccgcggcccggctgcaggtctccatcctcgacaactcgtccggagtcagtgccagcggcttttcacaaatcacatcgagccccgcctccaatcccgttacggtatgggtgcaatggaggtaattcggggtgcagaccgtcagaaattccgcacggccggcgaccatgcgccttctgaaatcatccggatcggtggtgaaataggcgcgggggaaatacccgtcgatcatccccacgctgtcgaatacatcgtgcgccgccaccagatcgcacccaagcgaccgcatggcgttcaaatgtctcggagctatgtacccggcaacgcctatgatcgcgaatctccgggattcggacgtctctacccctgtcatacctgtaacgcaagcttgattttgccgcaaaaataatacatacaaatattttgcgcaagccattccgcaaatcggcaacgatccgcggcgcaaaatcgcattaaaaaatacagaatccccttgctgttacggaaataacagttatatttgcatcagaaaaagcacattccaaatttaaaacaataaccagattatgaacgtacctgcaaatctgaaatactcgaacgaccatgagtggtgccgtatcgagggcgacacggccgttatcggcattaccgacttcgcgcagagccagctcggcgacatcgttttcgtagacgtgccgaccgtcggcgagacgctcgccgcaggcgaggtgttcggctcgatcgaagccgtgaagaccgtcagcgacgctttcctgcccgtcggcggtgaaatcgtcgaattcaacgacgcggtagacgccgaccccgcaatcgtcaacaaggacgcttacggcgaaggctggatcgtcaaggtcaaaatgtccgatcccgcggaatacgacgcgctgctgagcgccgcggattacgaaaagctgatcggctgatccccgccccgttccaagcccctcttccgagaggggtttgctccatgacagggccggccgcgaacgacgccccgccggaaagaaacgcacaacaaacttaaatatcaacagttatgtcaaaagttacagtagtaggtgcaggtgccgtaggcgcaacctgcgcgaatgtaatggcttgccgcgaggtcgcaagcgaagtagtcctgatcgacatcaaggagggtctttctgaaggcaagatgctggacatgtaccagtgctcgacgctgatggacttcgacaccaaactcgtaggcgtcaccaacgattacaagcagaccgccaattcggacgtcgtcgtcatcacttcgggcattccccgcaagccgggcatgacccgcgaagagctgatcggcaccaacgccaacatcatgaagggcgtaatcgaaaacgttgtcaagtactcgccgcgcgccatcatcatcgtcgtcgccaacccgatggacacgctgacctatctggcgctcaaggcttcgggacttccgaagaaccgcatcatcggcatgggcggcgcgctcgactcgtcgcgcttcaagtgctatctggccaaagccaccggcgccaacatcaacaacgttgacggcatggtcatcggcggccacggcgacacgacgatgattccgctcgtctcgaaggctaccgtaaacggcgttcccgtatcgcagttcgcatcgaagaagaagctcgaagaggccgtagccaacacgatggtgggcggcgccacgctgaccaagctcatcggcacgtcggcatggtacgctccgggagccgcttcggcaatgatggtggaggcgatcctcaacgaccagaaaaagatgattccctgctcatgcctgctcgaaggcgaatacggccagtcggacatctgcatcggcgttcccgcgatcatcggccgcaagggcatcgagaagatcgtgaagatcgacctttcgaaggaagaggccgagaagttcgcagcttcggccgacgcggtccgcaagaccaacaacgtgctccacgagatcaaggcgatctagttccgcgccaagatatacggcaaggccgccccggaatccggggcggctttttgtttcccggatgaaattctccgcacccggccggacattccggcgactttgcgcaggcgtcacaaccgatcccccgcaaaacccggcacaggattccgggccgcgacacgtatccgaaacagtccgcaaaaaccgccgccacacgcatccgaaacggcccgcagagaccgccgccacacgcaaaaggctgcccccgaaagggcagccttttatgccggtcgcagcagcgcggactcagaaactgaacttcgcgccgacgaaccagctgcggggcagcgacggaccgtagatatagcccgaatcgcggtcggcgcccttgccgaaatccttctggtaggcattgaagaggttctgcacgcccccgtaaagctgcaaggttatctccttgtagatacgcaggtcgtacgacaggcggacgttcatgtcgaagaacgacggcgtcaagacggccgcatcctgcgcgacgcccgatccggccatgtgctgcacgagcatcgagccggtgcaggttcccgtcaggtcggccgtgaagttccggaccggcttgaacgacgccgtgaagtagccgtaggcgtcgggggtgcggaacatgcggcgcacgggcggcacgtcggcgtcctcgctccactgttcaggctccttatagcggctctgctggagggttacgcccgcctgcagttcgaaccagcgggtgaagatcgcccgcccctcgacgttgaagccgcgcacggcggcgcccgaaccgttgtaacgctccttgatcttgcctccgtcgtccgtatcttccagatcgcgcagtgcgaagacgtcgtcgagaatcgtatagaacccctcgaccagcaggttggtctgcaccctgccgaagttgtgataaaggtcggccgaaaggctcacgctgtgcgaacgctcctccttgaggtcgtcggcgagccggatgcggacccgcttgccgcccaccacggcgatatgcatgtcctcgtcgaaggcctgcggcgcccgatagccgcccgcatagctcacgcgcaggttcaccgcctccgaagggttgaaacgaatatttgcgcggggactgaaaatcacgtggtccaccagattatgcttgtcgaaacgtccgccgatcagcagcgaccatctcttcgttttccattcgttctgcaggtagccgcccacgatatgcaccgtctgggcggtggtgatgtcgtagccgatcgaacggtcgttcaggtcgtcgtagctgtattcgctgccgagcgtcagttcggcgggcatgaaaagcagtttccggaacgcatggacgtactgtacgcccgccgcgaccgtaaggtcgtgcgtcgtaccgtatgcgtcggggtcctgcttgctgccgtagtagctcttgcgggccgtattctggaacgacgcataggcgttgaaacggttgcggcggtcggccgacgagatgtcgaacgaaaggcttccgccgtcgatcgagtggtcggtctgctcggccaccatcacctcgtggggcggcaggtccagcaggtcgccgccgcggcggtattcgtcgatgtggtggtactgcgccgtgatgcgcgaataggcgcccgtgcggaagaacgaccgcatgccggccgaccggctgttgatcaggggcagctcggtaaatccgtcgccgtcgtggtcgtaccccgaacggtggcggttctgagcgaagacgcaaagccccgcacggccgctctcggtcacgagcgacgcattgagcatcgtgttgttgtcgtaggagttgctgccgccgagcgaggtcagcgtatgcgccaattgcgccgaattgcgcgaaggttccttggtgatgacgttgatcgtgccgccgatggccgacgagccgtacagcgccgaaccgccgccgcgcagcacctcgacccgctcgatcatgttggccggaatctgctccagtccgtagacgcccgtcagggccgaaaagaccggatgcgaatcgacgagaatctgcgaataatggccgtcgagtccgttgatgcgcacctgcgcgaagccgcagttctggcagtcgtcctcgacccgcacgccgggctggaacgaaagcccctgcgccagacacgaagcgttcgttttctcgaacagcgcggcgtccagcacgctcaccagcgcaggcgcttcgcgccgcagcgtggccgagcggctggccgagacgaccacttcgtccatcgaaatgccgctctgcatcacctcgaaattcagttcgagggtctgtccccgttcgagcgtcacctttttctccagcacggcgtaccccagcgcacggacttcgagcgtcagctcgccttcgggcaggtttttcagaaaatagtgtcccgacgcgtcggtcgtggtgccgaatgccgtgcccgtcacggcgacggtcgcatagggaaggtgttcatgggtttcacggtccacgacgtggccgaaaagattggcgtcggtgctcctcttcggcgtctccgcggccgacgcaccggcatacagacacatgaagagtgccggcaacagatattttttcattgcttatcggattgtttgaatgacatacgtaacccgccggaccgcacggcccggcaaaaaacaggatgggaaggggattgcgggttacgccgcgggaggcgcgcgcagcgaaacgcccggaaccggcatgcagcgtctgcactgcgtggcttcgggcatcagaacgcccagcatcccgcaatagaacgagtgcgcgggctgtactgcgtcgagataggggaagaaatagaagtcgtcgacgatacagcgttccaccacgatctgatgcgcgccgttgtcgggcatcagatcgccgcagagcgcggcgaaatgcgcagggtcctccttgtagatgtggaccttgtgtcctgcgtacgctgcgaccagaatcagcagcagcagagcggcgtatatccgtttgggtgctttgcgtatcatctttctgctgccaaaagtagcacaaaaaaaggaccgcacaaaacggtcctgcaaaaatacccacaaacggggatgtatgtcgtgtcctgcacccggccgggagcggacgatgcggcgccgctgccctgcgggaacgggcgcctaaatgctgatgtcgaggatctcgaagtgaatcgttccggcgggaacctccacgtcgacccggtcgcccttcttgtggcccagcagcgctttggcgatcggcgtgccgatggccagcttgccctcgcgcaggttggcttcgtgctcggcgacgatggtgtagaccatctccttcttggtgttgtgattcagcagcgtcactttgctcagaatctgcaccttgctcttgtcgattttcgactcgtcgatcacccgtgcgttggcaagcgaatcctccagcttggctatacgcatctccagcataccctgcgcctcgcgggcagcgtcgtactctgcgttctccgaaaggtcgcccttgtcgcgcgcttcggcgatcgccgccgaaattgcaggacgctcgacggaacgcatgtggtcgagctcgtccctgagtttcttgtacccctccgctgtcagatagataatctcttttgccataattttatacgagtccgacgtattcagtttcataacaccgcgaaagatttcaaaagccggaacccgtcgaactctctttaggcatccgaaaacgcccgccccgcatctaaaaccttcctgaatccccctccgcagaggaggagtttcgaattaaacatcgtaaaaaaataagaatcctgaccggtgaaggccagaaccctgattttcattatacagcaaagataggaagtatattccgaatttccaaatcttttttcaacctgcatggcacggagtatgccctcacgcacgggttatgtatctgctgcttgcaattcacatcgcatggacgctcggagccgttccgctcgtcacccgacagaaacgtctgcccgcgtcggctgcggcgtggctggcgctgatcctgctgctccccgtagccggcacgctgctctacgtactggctggttaccggccgcacctcccggcggcggaacgccgcgcataccgcggcgaccgtctcggacagatcatcgcacggggctgcggcacacgcatcacccgccacaacagcgtcgaactgctccacaacggcaacaacgccttcacggcgctgatcgcctcgctccagcgggccgtgcggtcgatccacatggagtactacatcatccgcgacgaccgcatcggacgcaccatcgccgaaatcctgatacgcaaagcccgtgcgggactcgaagtgcgcgtcatctacgacgccgtcggctcgtggcggctcagccgcacgatgctgcgccgcatgcacgaggcgggcgtcgagacggcggctttcgaaccggtgcgtttcccgtggttcaccacgcgcgtcacccgccgcaaccaccgcaaaatagtcgttacggacggaaaggtcgcctacttgggtggcataaacattgcgaaatactacctcgacggagattacatgggcaagtggcgcgacgagcaccttcgcgtcgagggcgacgccgtcgccgacctgcagaagctcttcatcgccgactgggcgcgcgtacgcggcgagagtctcgacatccgccgccatatcgcgccgcacgacatccggcagcggctgccgatccagctcgcatgggccgaagagggttcctcgcggctgaccatcgccgaggcgttcgccgcggccatcgtccgggcgcagcgcagggtgcgcatatcctcgccctacttcctgccgcccgcgatgctgctcgacgcgctgcggctggcggcccggagcggcgtgagggtgcaggtgatgatcccgacgtgcagcgactcgccgttcacggacctgatatcggactcctacgtcggagacctgctcgacgcggggatcgaactctaccgctacgccaacggcttcctgcatgccaaactgctgatcgtggacgacgacacggcctcggtcggcaccgcgaacatggattaccgcagtctgctggacaacctcgaagtcacggccttcatccgcgaccggcaggtcgtccgggagctgtccgccaccttcgacggcgatctggcctcgtgccggcggatcgtgcggggcgaatggcggccggcggcatggcggcgcacgctgggcgatgtgctgcggctcgtgtcacccctgatgtaacctccgcagcaaccttaaaaccacctaatatcggcatgaaacatctcttcccgctcctgctctgcgcgctgctgctcaccggcgcggcttcgccccagcgccgctttcaggtcggcgtccgcggcggcgtcaccaccaccagccacacctttttcccgcgtggaaatcggagaaaaccgattccggcccggtcccgccaaggcgggctatcaggcgggcttcgtcctgcggttcaacctcacccgccgcctgcacctgcagtcggagcttaatttcgcattcgtcaattactcgatccgcgccgaaggctcccgcgcccgcagcggttcgaaatcccgctgctgctgggtctccagttcgggcccctgcggctcttcggcggcgcccagttccgcgtggccgactccgagcgggacagcgccccgaaactgctgaaggtgaatttcaacgacgacgtcggcatcatgggcggcgtgggattcaacatccgcaaattctttttcgacttccgcctgtctggttacgcccgttcgcacgtctggaacaccttcgtctccgacggcgtgtcgcagcgggtcaggatcccgcgcaacctcgtttacggaggttcggtcgggttcttcttctgaacaaaaaacaagggtgcggagacgcactctttttttgcacaataaataattttgcaaatcgttaatttatgcgtaactttgcgcgataaagcgccgtaaaagatttatcgatgaagcagacttttttatacgccgtgtgcggagtgatcctgatcactgcatttagcggatgcgcaggaatcaacgccctgctcaaaagcggacaacccgacctgatttacagcaaggcgctggagtactaccagaaggagaagtggtcgcgggcctcgacgctcttcgaaggcgtccagcactactactccggcacgccccgcgaagacagcatctcgttcttcaacgcccgctgcaaatacaagaaccgcgattacgacacggcggcgacgcttctcgacgatttccgccgcaagttcggccgcagcgccttcatcgaggacgccgaaggcatgtacgcactctgcttctactatctttcgcccggcccttcgcgcgaccagacgatgaccggacaggcgctgatcgccatcaacgaattcatgtcgcgttatccgcacagcgagcagatcgagaatttcaagaccatcaacaccgagctgacgcagcgcctgcacgacaaggcctacctcaacgcatacacttattataagataggccgctacaagtcggccatcgtatcgctcaagaacgcgctcaagcaataccccgaaagttcgcaccgcgaggagatcatgtacctgatcgtggacgccagctaccgcttcgccagcaactcggtcgccgagaagcagaccgaccgctatctggcgatgctcgactcgtacctctcgttcaaagaggagttccccgaatcgaaacatatcaaggaggtggaccgcatggcccagcacgcccgcgattatctggaccgcaacaagcaagaagacaacaacatatagcaatggaaatcaagaagaacattcccaacaacaccattacgcgtaaactggtcgatctggaccgggagaccggcaatgtctacgagtcgataaatatcatcgcccgccgcgccaaccagatcgcaaccgagctgaagaccgagctgaaccgcaagctcgccgacttctcatcgcccacggacaccatggaggagaccttcgagaaccgcgagcagatcgagatttcgcgctattacgagcgtcttcccaagcccgcgatcatcgccaccgaggagttcctcgacgacgagcttttcttcaaggagaacaaagaggtcaaggaggcgtaacgccccgccggcatggactcgcagggacacgacatacaaagccccggcgccggccgcacggtcgaaggactcgcgggacggcgcatactgctgggcattacgggaagcatagcggcctacaaggcggctgtgctctgtcgtttattgaagtgcgcgggcgccgaagtgcgcgtcgtcatgacgccgctggccaagcagttcatcacgcccctgacgatggccaccctctcgaaaaacccgattctcgtggaattcttcgacccggaaaacggagcgtggaattcgcacgtctcgctcggcgagtgggccgactgttacctgatagcccccgccacggccaatacgctggccaaaatggcctgcggcatcgccgacaacctgctgctgacgacctatctctcggcccgctgcccggtcgtcgtgtcgccggccatggacctcgacatgtacgcccatcccgcgacgcaggagaacctgcgccgtctggccgaacggggcgtgcggatcgtccagcccgccgaaggcgagctggccagcggactgacgggcaagggccgcatggccgaacctgccgacatcgccgccttcgtcggccaactgttcggcggagaaaatcccgaaaaaaaaaagagcctgcaaggtagacgcttcgtcgtaacggcaggcgccacgatcgaagccatcgaccccgtgcggttcatatcgaaccactcgacgggcaagatgggctacgccattgcgggcgcactggccgcccgcggcggcgacgtgacgctcgtcagcggccgtacggccctgccgacgcccgccggagtgcagcgcacggacgtactttctgccgccgaaatgtacgacgccgccaccgcggctttcgaccgagccgacggagccgtcatgtgcgcggccgtcgcggactacacgcccgataccgtttctgaaacgaaaatcaaaaaatgcggcggcgaaatgtgcatcaccctgcgccgcacgcgcgacatcgccgccgaactgggcgcacgcaaaggcagccgcctgctggtgggcttcgcgctcgaaacccacgacgaacaggccaacgccgaagccaagctcgccaagaagaacttcgacttcatcgtcctcaactcgctgcgcgacgccggggccggattccgcggcgacaccaacaaagtcaccttcatcgaccgcagcggccgggaggaactgcccctgatgccgaagtccgaagtcgcggagcgcatcgccgataaaatcgaatcactgttaaaataggccgccatgttacgtcgtctatcggttgagaattacgcgcttatcgaaaagctcgaaatggagctggacccgcacctgaacatcatcacgggtgagacaggagccggcaaatccatcctgctcggtgctttgggcctgctgctcggagccaagaacgacggctcggccatgaaagacgcggcgcgcaactgcgtggtcgagggtactttcgacctttcgggccgcggtatggagtcgttcttcgacgagaacgacctcgactatgctcccgaaacgcacgttacgcgcatgataaccccggccggcaagagccgcgccttcatcaacgacattccggtccagctcgcgcagctgcgcgaattcggcacccgcctgatcgacatacactcccagcaccagaacctgattctctcctcggaggagttccgcacctcggcgctcgacaccgtggccggaaacggcgggctgctcgcgcagtacacggcgcagtacgcccggctttccgaactgcggcgccagctcgcagccctgcgcgaagcggccgccgacggccgccgcgacgaggagtggctgcgtttccagtgcgaagagctgaccgccgccaacctccgcgaaggcgagcaggccgcgaccgaagcggaacttgccgtactggaaaacgccgaccgcatcggcgaagtcctcaccacgctccgcaacgcattcgacgccgacgaaacggggattctcaccctgctcaaaaactcggaaaacgacctcgtacgcatccgcgaacactaccccgccgccggggagtacgccgagcgcatacactcggtgctcgaagagctgaaagacatcgacaacgccgcggccgccgactgcgaacggatcgacgccgaccccgaacggctggcgaagctctcggcgcgtctcgacaccctctatgcgctccagcagaagcaccgcgtcgcctccgaagccgaactgatcgccgcacgcgacggttacgccgcccggctggcggccatcgtccacggcgacgaggagatcgccgcgaccgaaaaagcgctgcacgaaaccgagcagaaagcggccgcattggccgaccgcctgcacaaagcccgcgaaaaagccgccgcaggcttcgcgaaacagatccttgccacgctgacgcaactgggcatgcccgacacggtgttcgaagtggcgctgacgccgctcgccgaactgggccgcacgggccgcgacaatgtggttttcctcttcacggccaaccgcagcgcaacgccccagcccgtcgagcggatcgcttcgggcggcgagctttcccgcgtcatgctggccctcaaagccctgctggcccggtgcatgcagctgccgacggtcatcttcgacgaaatagacacgggcgtttcgggccgcatcgccgacgccatgggagagatcatcgagtcgctctcggcgacgatgcaggtcgtggacatcacccacctgccgcaggtcgcctcgaaaggctcggcccacttcgtggtctacaagcaggacggacgcaccggcatccggcgtctgacggccgaagaacgcatcaccgagatcgccaaaatgctctccggcagccggataaccgacgctgcagtcgcgcaggcccgcatcctgctcggcaaataacaccccgacaaaccgcaagcctgccggaacgaattcgctccggcaagcccttttaacccttcatagcatcgcacaatggacaaactcagcaccctcgccgccgcgaaccagcagcgcgcccaagaggtcatccgcgacagcggcatcgaaagcatctggcgttccgtgggcgccgaaccgcatttggtcggctcgctccgcacgggactgctgataacgcaccgcgacatcgacttccacatctactcatcgcccctgcgcgtagcggacagcttcgccgccatggcccggctggccgaaaacagccgcatccgccgcatcgaatacggcaacctgctcgacacgagcgaggagtgcctcgaatggcacgcatggtatgccgacgccgacgaccagctttggcagatcgacatgatccacatgccgaaaggctcggcctacgacggctatttcgaacgggttgccgaccggatcgccgccgtgctgaccgaccaaacgcgcgaaaccatcctccggctcaaatacgaaactccggagaccgagaaaatcatgggtatcgaatactatcaggccgtgctgcgcgacggagtccgcacctacgccgaatttgaggcatggcgcgccgcaaaccccgtcaccggcgtgctggagtggatgccgtgagccgcccctcccggtcacgggaccggcaggcggtaacagccgaagacggctcccgacaacaaaaaaaaccggagaccttgtcggaggtctccggttttcatatggcaaccgatgattacatcatgccgcccataccgcctgcgggcattgccggcatggcgggagcgtcggacttcttctcggccagcacgcactcggtcgtcaggaacatcgaagcgatcgaagcggcattctccagcgcgacacgcgacaccttggtcgggtcgatgataccggccttcagcaggtcctcgtacttgtcgtcgcgggcgttgtaaccgaaggcgtccttgccctccttcaccttgctgacgacaaccgagccttcgccgccggcattggcgacgatctgacgcagcggctcctcgatcgcacgtttcacgatctgaatacccgtcgtctggtcctcgttatcgcccttcatgccttcgagagccgccgtagcgcggatgtatgccacaccgccgcctggaacgataccctcttcgactgcggcgcgggttgcggccagcgcatcgtccacacggtctttcttctctttcatctccacctcggtagcggcgcccacatacagcacggcgacacctccggcgagcttggcaagacgctcctgcagcttctccttgtcgtagtccgacgtggctttctcgatcgaagcgcggatctgagccacacgggccgcgatctcctccttcttgccggcgccgtccacgatcgtggtgttctccttgttgagcgtcaccttgtcggccgttccgagcatcgaaaggtcggcatcctcgatcttcatacccttatcggtcgagatcacggtagcgcccgtcaggatggcgatgtcttcgagcatctccttgcggcggtcgccgaagcccggagccttgcaggccgcgattttcagcgtgccgcgcagcttgttgacaacgagcgccgaaagagcctcgccgtccacgtcctcggcgatgatcagcagcgaacggccgctctgagccaccggttccagcacgcccatcagctccttcatcgtcgaaaccttcttgtcggtaatcaggatgtaaggcttttcaagctgcgcctccatcttttcgggatcggtcataaagtaagccgagatataaccgcggtcgaactgcatgccctcgaccacctccacgtgggtctcggtgcctttggcctcctcgacggtgatgacgccctccttgttcaccttgcccatcgcctcggcgatcagcttgccgatcgtctcgtcgttgttggccgaaatggtggcgacctgctcgatcttggcgaagtccgtgccgacctcctgactctgcttgcgcagcgactccacgaccttcagcaccgccttgtcgataccgcgcttcaggtccatcgggttggcacccgccgtcacgttcttcagacctacgccgatgatcgactgggccagcaccgtcgcggtggtcgtaccgtcacccgcgtcatcgttggtcttcgaagctacctccttgaccatctgggcgcccatgttggcgaaagcgtcttccagctccacctccttggctaccgtcacaccgtccttggtgatctgcggcgcaccgaatttcttgtcgataatcacgttgcggcctttgggaccgagcgtgacctttacggcgttcgacagcgcatcgacaccctccttgagcagctcgcgcgcctcaacattgtatttgatatcctttgccatgatgtttttcctttattagatgatcgctaaaatatcactctgtttcatgatcaggtaatcgacgccgtcgatctgaatctcctgacctgcatacttgccgtaaagcacctgatcgccggccttgacctccatcttgacctccgaggtgccggggccagctgcgacaactttacctgccagcggtttctccttcgccgtgtcggggatgatcaatccgcccgccgtcttctcctccgcaggattcggcagaatcagcacacggtccgataatggttttacattcatagcttttgttgtttttggtttataatgatgtattagttagcatttgcaacctccttcccatcaattgatgtgccaaccggtttttggcagatgcagggtgacaaaggtacataccggactgtcattttgtcacgcggcgcaatttttcgggcgatttttttgcacggaccgaaaaagtatattacatttgcatcccgatacgaccggacaacggtcacacggtggatgtagctcagtcggttagagcgtcggattgtggttccgaaggtcgtgggttcgagccccatcttccacccttagaagcagttgaaaatcactgcaataaagagtaaaaaccttgtatatcaacgatatataaggttttttcgtttttgaaacaatcgcgtaaaatgtattctgaagcaggtttttatgacccaattcgtgacctattttatttcggtcaaaaattggtcacgaattacacataacgcactgtattgcaccgttttacgccacaatatccctatgctgcacacgtttaactatttcaaacccatgcagctatgtaccaacgcacaacattcaacgtagtctttttctgcaaaaagaccaaaatctctaaaaaaggaaaggctcctatttatgcccgtatcaccacatccggccaaacaacagagatctatacccaatgtcaaatcgaaccggaacgatggaaccagcgcctcgaacgctccctttacaaaggcgaagtggatcagcaaattaacagcatcgtcgccagttatcgggcgaatatccttgcggcctacgacctgcttctcaaagagaataaaactccggactgcttttccatcaaacaacgactgagcaatgcatccggttcaagaatgttcctcgtcgagttttcgaaatactgcgataaacggcaacaggaggtcgggacacgtatcacacaggtaacttgtaacaaataccatcgtttactacgatacatgaccgaatataccaaacagcaataccggaaagatgacctgccgctggatatggtttcctatgaatatatagacggcctaaataccttcatgcaaacagcccaccaatgcagaaacaatggtgccgtaaatttactttgctgtctcaaaaatttcatcttattcgcgatacggaacgaatggattgaaaaaaatccgtttcagtattacaagatgaaaatagacaaaacaaacgtcaaggttccattgacaaaagaagagctggacatattgataagcaaggaaatgcctaatgaacggctggaatgtatccgagacgtattttgcttctgtgcattaacgggactggcctttacggacgcagacaacttacaaaaacgacacattacaacggatgacagcggaacaacgtggatacataaaccacgcgaaaagacctctgtaataagtcgtgtgccacttctaccctacccgctcaaaatattacaaaaatatgaacataatcctgaattacaactcaaaggaaagttattacctatccccagcaaccaaaaaatgaactcgtatctcaaggaaatcggaacaatatgcaacatccataaaaatctgacgacgcatacagctcgccacactttcgccacattggctatcgaatatggcatgccaatcgacatcattgccaaaatcctcgggcatacaaatacgaatatgactcggcactatgcaaaaatttcagaagccaatattagccgggaaatgcaaagaataggaaaggttctgacagcatagactcttagggcacaggctcaaaagtccaccgagcggactggagcggtcagggacggacatcgatatcggaaaattccatgtgatattaacttgcggctttcataatcacccgcttaaatatatcattatggattgcatgcttattgaaacgagcgcttataacgatcttcaagcgcatatacaacggctattggaacgtatctccaatttgcacgcgctgtctgaaaaatcacaaaacacccgctggctgacgacagacgatgtttgcaaggctttaagcataactaaacgagccctgcaatattatcgcacctgcggcataataccctacactgccatcggcaacaaagtagtattccgggaagaagatatccgtcgtttgctggaaaaaaacctgataaaaactgaatagagccatgcatgaagacatcatcacacgtgacagcaacgtattcaaagaactgcgccacaacatcgttcgggctattcaagccgtagatatattgatcgacacacaccgcccgtccatcgggaaggaggtctatctcaccagcgaggaggttcgcagtatcttcggtttaagcaagcgatctttgcaaaactaccgcgacaaccgccagataccctacacttccatcggcggcaaaatcctatatccccagtcggcaatttataaattgttggagagccgctacgtcagagctctgagatgatgcaacgggcaggaggaacaacctcctgccctatattttaaatacagaaattggtttttgccatatgaacacacccaccattacaaaatatggcatgtttgcaattatgattcctaccctatttaggttctgtggcgaataaatattgatgggtatggttccggctgatgtcgctgtattgacaacaaggattgataatcaactcaaataatcattattcccatacaatcggttcatccacatggcaaacaacttgtccgtcacggaaaagaccttattgatttccgtaataatgtctttttcgagcagttttttcattgccgactgaacggaactcgccgatgtcagactatgccgtttgatgaatgccgccgaggttattcgctccgcttcgccgtctttggcgatggcatagagcaactctttctgtttttcgggtatgttcgacagtatttcgcgaaaaatagtatcgttcgaggcaaccatgttgtcgattgccgctcgaagagtttcgagcgtacacacctcgccttcgggagtgtcggcgaatgcctcgttgaacgtcttctgaacgtaataggtatgacctttgaacagattgtaaattcgctctgcatcgtcggaagcaattcgtcggttacgtttctcgaaatggccgacgatgaacggaatataaatttccggaacaatcgctttcaattccagcatatccgcgctatggtagaacggacgtgccgccgacgtgaacatctcctgcatcatgtggcgctcgcttccggcgaagatgaagttgcagttacgcagcttttgaatgtgcgttcgcagctgtgcctcgatatttttctccgggtacttggcgatttgctgaaactcgtcaatcgccacgatgcatggtttatctgcatgacctaaatactggaaaatttcatccagcgtatattccggccggtcgatatcgcccaattccacgttgaaggtcggcatgcccgtaatagggtcgaagccgaattttccgctgatggatttgatagtctgaataaacaggtcggccatcttgcgactgcggggcaaaagggtttcgtatatctcgcgccctaacaggtaggtgaactcccgtaagctcgacgtatggagaatatcgatgaaaaacgtataatattcggcagctatttcgggtttgtcgtagcagaattgaatcaatcccgttttacccatgcgacgcggtgaaataatcaccagattgttaccattggtaacggatttgatgagccgtgctgattccgtcacacgatcacaaaaatactccggttctatcttacccgtcacgataaacgggtttattacttttgccatatgacgatcaatttccacaaaaataattattcaatatgaattatgcaaatagaataattaaaaatgtcaactatcaggccattcaaaccgtcttccattttattcatggatgtcgatacattacccagccgttgcctctcgccgcccgaatatcgcacggaaagtcacttgcaccggcaatacgagaggatgtgatgcgtcggaaactacccgaaaaagaacggctgcgatttttaatcacagccgttctttcaatggttcaggttacagcaatcctccggatcgggattgaaccgttcgcgcagcccaagccgtaaaagccggaccgtgtgaataaattcgctgtccataacgataggattcggaatacttatcccagtcgggaatttttatggtgtcggttttgatttcgggacagcggataatttctatctcctctttttcgtataagttgcagccgacgaacagggatgctatgagtacaccccagatcgttgcgaggatgcaatacaggagtatgtttgctatttttcgttttttcatcttgttattgttttaggagttcagcaatctccggatcgagattgccccgatattccatacgtccgtccaagcggcaggcttcgaggaaatggcggcggccctcctccttacgcccaagccgcgagcaggcaatggcccgtaggtattccgtcacggcatccttcggcatcgcagccaacagctccaacgcccgttcgttgtgatccatcgagaggtgcgccacaaccgtgttgcggtcgttgtagtcgttgagaatgtacaaggctttggcgtatttgcgtttttgcaatagctccaccccgcgggcataggccgtatccagttccgtggtgtgaatcgtgtccttgaccattcctttgcggcgcagattgtagcggaaattcacggcccgcagctgcggatagatcaccgagcggatataggcatactcttgggggaaccgctgccggatggtctgttcccgtcggtcgggattcttctcttcggcgatcagctccaggatggcatcgcggcttccgatctcccggtctgttcggatgcagttcgtcaattccgtccagtcttcagctacccaccgcacggtgagcatcgtgtcgatgcttctgccgtatcggcggacaaggtagcgtttcaatgcctgcgcccgtccttgggaaagacggtcgttgaaagcataatcgccctccggagacgatgccgccgtcagcgtaatggtatcgacgtaaaactcctgctgctcgacgatctgccgcatcaggccggtgatcttgtccaactgccgccgattgtcgcccagcgtatcgaccacgcgggtatcgcccacaaagaactgaatgtaattgcgatcctcgaccgtcacgaacttgtcgataaccttgatgcggtaacgcggcaaggtatcgacgaaggagatcatcgaggagacgacgtaactcaacgtatcggacggcggcaggcggtaggcactgtcgtccactgccaagacctgcccctgaagcgttaccagcatctttttcgaggtctcgtcggtcttcaccgcttgggaatagtaatacgtgacggtgcttcggccttcgaccagcgagtcgagccggacgtcctccggatagggaaacttcacgaagcggttgaaggccgcctcgcgccccacggtgtcggggcggaagcgttcgacataggtttcatactgccagtagtcgcgctgttgcaggagcgaaaaccgcccgccgcggatcaccagatcttcgagcggcacggattcgtcgggtttgtgaagtatcggcgtgattacgacgctgcggctgcgccccaacaactgcttgggcagcgtcacgatgaaatccaggacgacgcgcccgttgcgttcgggaatagaccgcatcttcgccacgaccgtcacctgctcgatctgaagggccatgacacgttcgccgtcggcaagcgtatcgaccggggtgagatagaacgtattgctgtcacgctgcaacttcacgacctgcgggcggtagtcctgctgccactgctgccgttcggcgcgggtaagttgcgccaaacctgccgtcgcctgctgccgctgaagccgtccagctaccgagcagccgaacatcatccataggcagcagccgagaattgctccggcagttatgatttttcttttttccatccttaaaacagatagctgaatgaaacttccagttttgtcggggccagcgtccaacgtcggtaacggtagatgtattcatcctcccagtccgagacggtcggatcgcggcgggtatccttcgtgcggtaaagtccgagaccggcttctaaggccacgttccagcgtttagtgagcatccacgcatatccgtagctgacgccaagaccgtaggcatgacctttatagcgttttgtgcggcttccgagatcgtagccgacataggtaaggtgctgtccgagaaaatgtccgacgaaggattcgtagaaccaatagcggccgccgagctgcacggcgtgaaagttcatcgagagggatgcggtattcaccggattccagtagccggacagctccagcgaccagttgtccgtcagggccgcttcggcgccgacgttcagcgtcgcgctgcacaccgcaagagcgttggcccttacggcgaagatctgcgccgcagccttgtagggtgctccccacaaagccgcggtcagcagcacgaccagaatgatttttggctttttcattggaacacgattcgttattctttgatacatcgcacgggattggcctgacagcgcagttcgctcgtcgtgcggcgtgttcctgccagatagatcgaggtgcaggatacgccgtcgaagtacgacgctccgtagtcgaagttccagaagtaaggcgtattggtatagacctgcccgtacgtcccggcgccggagtagctgtcgccgtcgaacgtcccgcccgcgggatagcgcactgttttcgtcccgccgtatacgatattcacgcagtacggaagctgtgtttgcgacatggcgatcccttcgaagtcgcaggcgtcgggaaccctccatccgggagggcagggatcgtagatcgtcttacggcagaccttgctcacgtcgtatccctgttcagtagtgtttccccaaaggttgtgatgactccggaagagccagtccaaaacatcctcttcgggctcgtcgacttcgtagtcggccttatggataaaggtcgtgggatgcagcgtcgcccattccacgctcatcacctcccgtgcgtcataatcttcgggacggatcgttccgtatgcgtagctgtcgtgatagatgaatgaggcgggtctggcattgttcgtaaacgaggccggatacgggaacgggtccttgcggccccactggtagtagagtccgcaggccgtgactttcgtatagtcggttccgacagcacccagattccggtccatgaagatgtctccggagctgtatttctgcgatgacgactccggatcgtagtttgcaacccagatgtgccacgaccaaacgcactcgcccccggcgttgaacaggccgataagggcgtttccctgctgcgtcccggtacgaaagcagatgcggctgccgtcatagcccagcgaggagatcacgctgttggcctgcgtcccggtctcccaaaccaatcgtgcataagctcccgaaagccgctgcggcgtgatattgagcgtcgcgcagccgttgccctgcaccgtggcatcgaacgaatagtcgcgtaaaggctccggcgcgatgtaacagttggcggtattaagcgcgtcgagttgtatttcgccgggcatgaatacggggtagatatgccgaagcggcccggcaggcacgaactcaaaggtttcttcgttcgagagcagatgatcgtaccccgcatcgaagtaccagccatcgaacgtatagcctgcgtcgggaacggccgtgagcgtgcagttttccatgcagagcgccacggttcgttctcccgaaccttcggattcggtttcgacatgaagcgcaccctcgacccggacgcttcctccgtcgtcggtatgaatgatggcggcgttggccatgcggtgcgaaaagtcgtagctctgggtgaagccgagggcgtcggtcagtgtgatacggtaagagaggagcgaattgtcggccgtgtaaaccggcgtgtaatactccatttcgtaggcattctcgccggcggaatcatacagatcgaaatcatggacggcgcccttgtctccgtaattgaacgtaaagcatttcagatcgcccgaaaggacttccagccgtccgcgcgtcggggccgtgccgtcggggctgtccacgtcgatatagagatagcgcgtgccgtctaaaaggcagtagccgccgtagttatagtcatcgaaatcatcccggacatgcagcgtataggacgaaatgcgggtatcgacctcgctgtcgcccaaaatcgaaatgttgaaccagtagtgtacgttcgcccggacattgaaatccgaggtgttgtttccgcccaaatagacgtaataggccagcactttctctccccgcacggcgcggatcagcagatacgaggcattcgcgggggcattgtcggggttcttctgtcgctgatcggtaatcgaagctaccgtcccttgcctgttcggaagcaggtagcagtcgcctgcggcctgcggcccagtgagtgcggtttccgggcagtccgtatagtcgtccggattatccgacggtgcagccgccatatcgaacacagataccgagcgcggtacggaaagaagctgcacggagcaaagctcgatatccgcgggcttgacggaaatgttataagaaacttttgccacgcaacgttgcacctcgacggccggaagcatcagcacaccgtctgccgacgggattatcgcaacgtcgtcctcataggacatcggcagcatatcgtactcgtcggcgtgcgtaacgataaaatcttccgataccggattttcacccaagtcgcgtcccatattggcggcaatacgtatcctgtagctgcccggcaggcactcgaaacgcagtgtcgcagaggtctggtaacggtgcaggacaatctcgccgttatcattgtaaagatagaagttcaggtcccgaatcattgcttcgtccgcacgggttacggtcatcatagggtcgggacgaaccgccatttcgacccgaactttcatcgggcggcagcaagccggctcatcctcgtagatgcagctgcaaagaatgctcagcgggagcaataagctataaagaaatcgtttcatcttgtgtcaagaaaaagggttccgcccgaaagacagagcggaacccgatgcaacaattcggattatgctccgagatcgacattttgcgttacgggcgtctcccagtcggcgacggtgaccgtcacaacgcaatcctgacctacgagccccgtgatattggccgcgatgcggtagtagccgttacggaggatttcgcccgcagctttgcccgtcagctccaccgagtaggtcacctccgagcggtcgtccgtggtcgaggcattgccgtccagatcgtacgtagcgttgatttccagcagcacgcggcttccagcagccaaagctccgttctcgaagcagtagaacagggcgttgtatttacccgatgccgcggcgagggtttgggtatgcgtgtagctcatggccccgggcgtcggtgtcccagccacgacgagcgactgcgaggcagctttggagagttttacggaattgacggtaagcgaaccgccgtatttctgggagaaagaagggtcgatggtcgtctgtaaagccaccttggcgacggtgcgtttgagcgtgatgccgatgttcgtagtggtgttcacagccccgacggtcttggtcgtggagcccgacatcacgaagccgccagaacgtttggctgcggtggacacctcggcgaaagttccgttgtaggccgcagcggagttttccacgagggccgtaagggccgcccgggtcttggccgacgaagcatcgtagttcgctacggcgtagaacgagcactcggtgccggccgcggacttgggaagtgcgaaggtcgccgacttggaagcgagttccgccgaggtgaagtcacggcggacgatgagcgttccgcccttgtcgaaggcgaagaccgaaagcgtcgaaagcgaggattcccacgcttcagccttggccgtcgtgtcgaagaacgcgcgggtttcagtatcgccggctccgatgagcgtgatggcgatccgggcgccgtcagcagcttcgggtatcacagaattgatcgtttcatcgtttttgtcgcacgaggcgaacagggcggcggccatggcggccgcagcaaaaagaatctttttcatggtgtaataagaaattaagtgaatgaactatttacacttgttgtgttttggatatcggggttgttccgagtatgggacaagtggcttttccttgcgcgccgggctgtgatagcccggcacgccgttctcgtcgatccagttgcggatgccggtacggaggtcctctttgagctgccggaattccggatgttcagcgaagtcgtcgtttaggttgtacgcccggaagatcggagtgcagatgcgggtgagcctcagagcgacctccttccgttggctctcgggaatagccggaaagtccgtcgcaaggatcagatgaacggtgtcatacttcgagaagagcaggccccggaacagcaccttatcggcggcacggactgccgaatcggcagtcgctcccaactcaacgctttgtgtgtagctttcaaaggccagacggctgcgtcgttcgatcatcgcccggtggaactgacgcggaggatggcgtacttcgaggaaatgccgcagtcgctcccggaaccatttttcatcgggggtttccatcgcaggagcggattagcgtttgcgaccacggccctgatccgcagcctgttcctgcgctttctcggccttctgctcctgcttttcctgctgctcctgacggcgctgctgcgagaaatcgtaaacgacgccgttcgagcgggggtcgatacgcaggatacagttcagtgccctgccgttcttgcccagaatgggacgctccttctccttcgagcagtccagaccttcggggctcagcagggccgtgcgctgacggtcgtcgagttgtttgtcgagctgcggagagatataggggcggctgaactggtagtcggtcatcttgtattcgttcgagaggacatcgaagcccactttgcccgaataggtgatgtcgctgccgcgcatggagcagccttcgacgaagacgcggccacccagagccagctcgttctgctgcgtatcatccagacgcacgccgttgaaataacgcagatcgggaacttcgtttttcgggatggtgacaaggcggttcgtcgccggattcagcgtggcgaagcaccactccttctctcccgtatgcgggttgggaagttcgtacaaccggtcaggcgttttcccggccaacagctgctccttctcactcgtggagaacatcatccggtattcctcgcgctcgaactccggacgcggaagggcgctagtcagaccgacctgcacgtcgccgttctggtccttgtagggatgcagggcgaactgtccgacaatgggcatattgccgaccttgagatttacgtcatgcagttccgtgcacggaaggccgtgcttcatggcatccagctctttgggagtaacgatgatgcccatctcttttagttcctgcaacttcaaatccggagtgtcgaatttgaccttttcgagctggtacgaggtgacccgatgatcgtaaagggctttaaggccctcggagtctttgggattgtcggcaaggcgcagcagcgattgtgtgacttcgctggccttgtcggcagcgactttcagaaaatgaaagggcttggcgttctcctgcgacatgaagcccttgatgaaggctgcgactgcggagctgttgcgaagttcgtagaacgcaggtttgttggccgtgagcggctgcgtcgtcgtaaccttgtattggttgccgctctgtttgaggtcggagacggcctccacggcgccgttcctctcgttgtaaagcaacaaggtctccttgtagttgggatcagcctgctcaggggactggttggggtgttggttctgattctgattttcttcggacataaagcaaatgtttttagtgaaacaaaaggtttatgccgcgaatatataagccccgtaatccgaacaataccgatgtccgcctctgtccgctccagtccgttcggcagtctttacaaggcgtgtcccgtcctgaaaaaggatgcgaagctggtcgcaaatatttcggtattttttaggtttcgataaaagataacattatatttgcaaaataaacgtgtttaactacacgccaacagacgtgatacaaaacaaaacaataaacgtgtatcactacaagcattcagactatggcaaccatttcagaactattggcttcgtcgttagcggcactcaagcaggtacaacagaacggtgattgtaccgtcgtcaaaagcagcgaactatcacccacgcatctgaaaaggctgcttgcgaaccactttctgatgccggtcatcaagggatggtacatcgtcaccgatccccggaccgagacgggcgacagcacggcatggtatgcttcattctggaacttcatccgacgctatgccacggagcgctatggtaaggagtggtgcctttcggccgaacaatcgctggcgatttacagcggctccacgaccgttccgaggcaagtgctgatacgctcccctaagggtagcaacaactcactggagttgttgccccctacctccttgttcaatctggaagccgctctgccgtcgagaatcgacaccgacaatccctaccgactcaacctttatccgctctccgaggcgattatcgcagcgacgcctgcaatctacaggaacgacgccatgaccatgcgcacagccctttcgctcatacgtgacagttccgagattcttaaaatcctcgtggacacggggcagaccgttcgggcaggacgggtcatcggagcatttcgcaacatcggccgcaaggatatcgcggacgaaattgccgcaacgatgaagcgtatcggatatgacgttagagaggaagatccgtttgagcaagtcataaaagtcaccgtcgcaacgtcgccttacaccacgcgactaaggcttatgtggcagcagatgcgcatggaggtccttacggatttcacacgcgagaaaagcaacctttcctcctccgaatacatggagcgcatggaggcatgttataaactggatgcctaccactctctttcgatcgaaggctatcgggtcaccgacgagttgatccaaaaggtccgcagcggtgcatggacacccgacggagaggatgccgacttgcgaaacgccctcgcggcacggggctattggcaggctttccagcaggtaaaaaagagcgtcgcggaaattctcggcggaagcaacggcgcgactgtcatcgcccgtgatcttgcgacatggcacagcgagatgttcatgccttgtgtaacggctggcatcatcaaggcatcggaccttgtcggataccgctcccatcaggtatatatccgcaactccatgcacacgccactcaacccagaagcactccgcgatgccatgacgacgctgttcgaactgctctcggaagaaccggatgcgcgggtgaaagccgtgttgggacatttcgtatttacctatatccatccctacatggatgggaacggacgtgtggggcgttttctgatgaacacgatgctcgcatcgggtgggtacgactgggtgattattcccgtagagagatgtaaagaatacatgtcagcgctcgaacaagcgagcgttcagggtcagataggacctttcacgaaatttatctcttcgatatagaaatgtccgtcttgaaaaccgagatcggacaaacaacggtccaaaccccaaaaagaaaggtgcacaccatatatggcgtacacctttcatggccttatccggccaaaaatgaggcgtcttactgctgataagtcagcgactccttacggaactccttcatcagcttctccacttccagcgatgccttgcgggcacgcgttccggctgccttgttgcctttctctacctgaagggcggcgtctgccgtaaaagccgaataggcgttctgaatcttttcaatcaactctttcatcgtttttcggtattaaaaaattcggatggcaaagataacttttttccggaaaatacccacactcatccttgttttttcttggggagcagctgcgataatttcgggtcggcctcgatgcgagcgatctcccggaggacgagctccgcaatgtcggccttgacccggtaatagttctcccggacaatttccgccatatggtccttgccgtcttcgccgacaaaagaggatatttcaggaatggggacataggccgcagtttccgtcctgaccttgtcgttatcgatgacgatctcggcatggaagattttctgctcgatgcgctcgtcgaagttgtcggctaccgagcccacgaacataccctgtgtgagattggagattttcgcagccggaatcagcgtttccagctgcgtattggtcgaagtcgtaacgttctcgttcgacaccgagtgcgactcgcgcagctggacgatcttgccgaaacgatccgacaaggtgcgggccgtatcgcccacgacctgtcccgaaaagatgttgcccacggtattgatgatgaccttggcctccttctctccgtagtcgcgctccaactgcgaaaagtcctgaaatcccagacagacggaaaccttgttcgagcgggctgtggcaatcaggttgtccaaccctcgaacgtaaatcgtaggcagctcgtcaatgataagggacgattttaattttccctttttattgataagccggataaggcgggaattatagagtcccaacgccgcgccgtagatgctctgtcgatcgggattgttgcccatgcagaggattttcggttcttcggggttattgatgtccagcgtaaagtcattgcccgtaagcacccagtagagttgcggagagatcatacgcgagagcgggattttcaccgatgccacctgtccctgcaactggtcctgcgcattgcttttccatgcgtcgacaaaaggcgagaggtagttttccagttcgggataagatgaaaggatcgggaaaatcttatcgagaggctggcacaaaaattcgatggcatgcggaaaagtgcaatagcggcctcggtcgtagattttcaggtaccagataatcgccgcgagcaggatgacggccgaatcggtgaagaagtcaccctgcttgtcgacccacgtcttattgaggttcagaagcgtaacgtaggcgctttcataggcatccgagatgtcgtccataaagcgggcgtcgatgggattgcagcggttcgagcggcggggatcgtcgaaattgatgatgcagaatttcggtttgacttcgtatctgtccagatgccggagcaggtggttgtaggcaatgcgcgtaaggtcgtcatacttataatcatagataagcatcgagaaacccttctcgatatgctgtttgatatagttgttcagtacggcgtagctttttccggagccgggcaggccgatgaccgccgtcgatctgtaaacgtttacaaccgatatccacccgttccgccattgtcctttatagcggtaacgcgtaggtaggttcaccgagcaatcgttgtcaatacaacgttcctcctgaagaaaactttcgttattgtcattgaaaggatcgtccataagcggctgtttcatcaatcgccgcagccacacgccggcggccagcaggcagaggtagcccgcaccgagggtcagcgcatagcaccacgcccgcaagccgatgtccgcgggcagcgacagcaggaagccgttcagaaaaaacagcgggagtcccagacagactgcaccgacgatatgtcgcctgccgaccttgccgttacggacgctcttggttccgtagcagccgacggcgagaaacagaaaggcgcagaatttggtaaccatgggagaagagaacagcgacgtcgaccgctggatattcagcagaaggcggtcgacgaaagcccatgtcaggccgcttccggacaaccactcgtaacaaaaccaatagagatggaggataaggaaaaacacgcccagcccacgggcgaactgtacgatactttcaagggctcttaaatcatcttcctgctgcatgatcgaaacattaaagccctgaaaatacaccagcgacagaaaaaacgttgccggtgtccgcccctgtccgttccagtccgccccaaatacaggaagcggacatgtcccgtcctgaaaaaggtttacagaaaagagtaaatcttatgcagcaaaaaacgaattcagacttatcacgtcattatttatcgcgtcagttgcgtcatctgattttacaggagtatttgagcggagtcaagacggctcgccaactctccgaagaacatggtattcccatgtctacgattcataagatgggtcagcggtggaaagcgaaaaatagttgtagctttgtgagtacccctaatccttatccgatcatgtcccgcgttacgagtgaagaagccagtgaattattatccgagaacaaagcccttcggcggcgcttggaagaggctttattacgtctggaaggctatgagatcatgggagatatcctccaagaagaatacggtatcgacctgctaaaaaaatccgcagccggacagtccagcgtctcaaagaaagacacacagcaatgagcctgtcgtttctgtgcgggttgttcggctatacccgtcaggcctattataaacatttacggcgtaatagggaaggatctttgtccgacacccttcttttggagcgggtgggttactaccggaaactgatgcccaggctcggcggtcgtaaactgtggcatttgctgcaacaagacggatttccggtcagtcgggatcggttatttacgctgctttcggaaaacaatcttctggtcaaacgtcggaagaaatacagcgttacgacctgctcgcggcactggatgcgtaaatatccgaatctgatccggggtttcgacctcgagcggccgcatcgtttatgggtcggagatattacgtacatttctttgaaagaaggatttgcatatctggctttgataacggatgcctattccaaacggatcgtaggctatgatctgaatacgacattggaacgggacggagcgctccgtgcactgaggatggccatagaccagactccgcagcaaaaacggcaagggttaatccatcattcggacagaggatgccaatattgttcgaaagaatatgtgaaattgctgaccgataatgggattcgcatcagcatgactgaaaagggcgatccgtatgagaatgccgttgccgaacgggtgaacggtattctgaagagcgaatggatcgacgaggaatgttttgaaagttttcaggcagcaaaagaacgcatcgaccagatcgttatcctttacaattcactcagacctcatgccagctgcgattggcttacgcccttggaagcggaacttagaaccgggaaactcaaacatcattggggccgaaagacggttgttcggaaggcatatgtaaacttatatcaggacaatattttttgaaccaaaatgtttatctttaattatcaatcactgtaaacctttttcaggacgggacaacaaaaagcgcccctcggatgaggggcgccgacgcttatcgctggctctcttcaatcagagagttgcgcagcagatccagaaaccgcgtcagccgcaacttgcggttgatgaccccacggcggcattggatggggttgttgatgcggacattgagcatccacgagaacaactcgaccaactgttccacattggcacgggtaccgtcgatacgccgtcccacgccggcactatgcaacgccgtaatcagctccatgaggtccgtcggcgtgaacggctcggccaaatagagcgccgagcggggtttttcgctctgcggcagccgatccataaccgcgggatgctcgatacgcagatggaccatccgcatctcaaattccagatgtgagacggctccttcccaaagcgcgacaagcgccgccggacgccgttcctcgcaggagcgcagccgcacgagccggttccgagcacgggacagggcgtgcagcatgtcgagcggagcgcactgctccgacgccacaagacgctgcacacttcctataaaacgcgcataggacgcttccaagcgtttaaaatcacacggttcggcgccgtcctcctgcgacatgcaaagctgtttcacaaaatgactcttttccaaaaggcgcagattatgcgatatattctttttatcgggtttcatttttcaagattttttgttttctgtttctgacttacaatttcgtgcggacaaagttgcagggcggcccccgcgagcggaaggcggcgtcacgacagaaaacagcgaaccccggagttcgaaactccggggttcgataacgagcaggcacagcatttcccgatcccgcttcatattgcaggcggtaccggggatcagggccggcaggagggattaactgtaaagttgcagattacgcattttttcaggattacacagcaagaatagctttcgaggcgcgaggatagcaacggtcattcctctctcacaaaacggccttcgctgtcgaagtgcagagtgcggtcgtcagcgccgaagagttccgcacggtatccctcccctgccggaaggaaagtacagagaaaatgtttcggataatgattccggatatggtgcatcggaagttccggaagcagatcggccaactctcagggcatctgccgcaggtaatagcgaaaacctcgcaacacaccgtccgccgaaaacagcatataaccgccgttctcattgaaggcatagtaaaaacgccggtcccaacggtagttgaatctgctcagattggaataatgccgcaaaacgaaccttcgaatcgtttcgggtaactgcttagtctcaatgctgcgtcccggaagtttttcgggcgacttgcctgcggcgcggaaagaggctccggagaccaccagcaaagccaaaagaaaacgtatcgtcaacagtctcatatcacataatttttatattcatagcgtttattgtcattctgcatcgctgccatcacatggcacagaacattccttatttttctcaatcagttccggaaaattgcgccggacaaacccgcccagcgaattgtaattcagacccagccgccgggcgatggacttgagcggctctgcagtcgtctcatagagcccgacagcttcggcgtatttctccatgctgcgacgcgagatgctgcggccgttcgaagcgcgcatcataccctgccgggcgtacagttccggctcgtgctctttgaggtactgccgaaagacctccggatgcagcccgaactccgcggcaatctccgacgtgggacggttctccgcacgcagccgctcgatggccggagcgtatttggccgccgtggtcttcttgtactgcttggtctgcgaaaggctcgcaccctcccgatactccgcaccccggcgggcgaacgtctcctcccgacaccagacccgcagataactgcacagggaacttcgattaacgcccgtcatgtcggcaatctcccggatcgtcagagcactctgcgcatacatccgcacggcctcccggtaacgctcgcggctttcgggcgtcggctcgtggcgccgtccgctgccggtgatatgtccttttcttttttgcgtcttggcgcgctcgcgcaactcgctgcgcgcctgcagcaaatccttgtgatagaaacacacgtgctggcggagcccggtaaaggagaccccgcacttctcggcgacctccggcaacgtaagttcagttgtgcgaagtagtttgacggctgcggcgtactgctcccggcaccacggacgcacgccccgctgctggttgtccgcaaaacccagccgccgacgctccagctcccggcgttcgagaagccccggacagtgcgcacgaagctgattgctcaaacccgtggggttcagtccgaacaggtgcgcaatctgcgacacgttgtattcgaaatactttgcatcaccgcaggcagcaagcgcatcgccgtacttggcgcgcgcagccgcagtctggccacggcgtccccgcaggcgcgtatgcgcggcatccgaagccgaagaagccgccacgccgtgacgcgacagcagcaggtcgcggcggtacttgtacagatagctccgaaaacccgcatacgacacaccgcaacgggcgcagattgcacgaacgctcaacgacgtagaaccgtacaactcgaccgcctcgcggtacttcgccacggtacgggctgcaggacccttttgccgggcgttctttacgaaatcggctgtcatgggacgaagattccctgcctcgcttcaaggactttccggaggaggtgggggggggtaaaacaatcattatcagcacacgaaaaaaacaaggcgacacatgcagtgaaacaatttcgattcctcacaggctgcgacaacatggagcaacaaaatttgtatcgttcatctcttcttcgattacagagggaagcagtacccgaaaaatggagcgcatggcaccatcctgcgcccctgctcgaatcagcctgccgtgtcactccgaagccttgggattcgggccccaagcattgctcttcttctcgccctccaagcagaagagataaatcagataaaggttgacaaggggaatcaggctgagcagcagcatccaaccgctcttgcccaaatcgtgaaggcgacgcacgcacacggccaatgcgggaaccaacacggccagtccgtagatcgtctggataaacggaaaccttaacaggatgccgataacggtcagtacaaccattatgatcaggttgaacagcgtgaacatccaatactcccggcggcgggcacgacctttgaagtcagcataatgttcttttacaactttcagataccaattcataattcattctttttcgtgttaatgaataaatcaatcgttcattgtccgcggccataccgctcaaaaagccagaagggcagggaaagcagccaagccgcaaggaccggcagcagcacgacgagccccagacacaggcgcaagagactcccgcttccgcaccggaatacgcgaggaaggcggacactaatcatactccacgcggataaaccttccgtccgccgcatagatcatctccgctccgctgcccagcgtaagcttatagccgccgcgttcgcgctcggccttcgaaatccttgctccggggaagcgctcggcaaggtcgtcgacaatagcctgcggcacgatgcccgcaggcaggaacgagtattcgcagtccacctttttccaagcgcccgaagcgtggaagtcgatgtccgtgccgttagacaacttcacttcatactcgcggcgtctgtcgtcgcggtcccgctcggcatagacgcaactctcggtcgggaagtaagtttcaataaaggctttcgccttggtaggcagacgccggtaagggatgcgcatcgacgcgcactcagtaaaaagcagcacaccggcgaccaatgcggccagcatcatcgcacaatgtttcatcttcaaatttttcaggttcatagctttcaattcaaatagattcaatgaaggcgtttgtcggaaagagagagggaaactccgcgcgtaagcgcatcaggcgcgaaaacgttttacacgcggagcgttcctaagcatcagtagcgttcctcacgcacgaaggttccggcggccgaatagatcaactccaccccgctgccgatggaaatctcgtagccgcccatcgcgcgttcgaccttataggcgccggcgccgggatagcgcgcagcgatatctgcggcgatggtctgaggaacgatacccgcgggcagcagtgaaaacttacagtccacctcgaaccactgtccctgcgcgtcgaatttgatttcggcgccgttcgacaggcgtacctcgtactcgcggcgtccgtcgtcgcggtcccgctcggcatacacacaactttcggtcggaaagtaggtctcgatgaatgtacgtgcggcggaaggcaacttaccgtaggaaatgcgctcttcgtcgtcgcagccccacgctgccaacagcagaaagaggaacgccgtcagcacggctgaggtacttatttttctcatatcttcaagtttaagttatataattgcgcagcatgcttatttttcgctgcataatccagtaaccgtcgtttgacatcggcgaatgtcttcgatcggaaaaccggtcgttttcactctattcggtcttgtcagtgtttcgggcggcatatttgtaatcctcgtcagtaaagacgataattaaaaagtaaaaccggtcctaaaagtcaattttccgaccttaaaataatttaccgcttcaatgctgccgttctgcaactccatacgtttgaaatcgccgcgctgccggcagtagccgataccgaaattcacgcttttgcggcggcgcaaacgcaacgagacacccaattcgggccgaagatagaaacctccgcgagtaccatatatccacaggtcgccgtgcgacggtacatacgattcgcttatctcataattgacagaaacaaatagcggatcgtagcctgtgtccagtaaaacgtatggcgtaatcctcgattttaacagagcgtattttcctcggacaaacacgggcgtggacatgctgaaaaagttaccgaccgtattgaagcagaaggatacgccgccacccagaaacaggtgttcgctaaacgtgtagccgccgaccggtgtcagggagaatcccgtgaaggaaattttggaacccgcgcttgtaaaagcgccgaattcgagcgtgaaattaccgcccttatacgccttgtcggaagcgtgccgagcttggactatatccgccgacgccaaaagacataagacgaatatcaaacggtatattcgtgcgggatgtttccttttcatatcgtaatatcaaggtattgtcgtcaaaggattgtaccctcggccgtgatacggagatcgacctcctgcttgccgcgttccaactccacgagatagtattccacggtcggcgtctgaacatactcgatgtcgtcgatcgaatagctcgcccactgcgacgtggcaatagccgctgtgacggcctgcggaagctccgcacggcggatgtcccattcggtgtaaacccaagcgttctgtccgttgaaatagacatccttctcgcggccctcgtgccaaatctcgacttccagaaggccgtcgtcgtaatcctgctccacgatctgcgcgcccggatatttcgaggcgatgaactcggcgacagtcgtatcgaccaactgaccgttgccctgaccggggttgccgcccgtattgccgccgggctgtttgagcgtaagctctccgtcgggggagatgtccaccttgacgtcgccctgtgcagactccagatcgaagcgccagaactcgctgtcgggcgtttgataatggtcgatgtcgtcgatccaatacgaagcgtactggctcttcgcaagcgtcgtcatgacgttttcgggaacgtccgtgcgccgaacctcggtcttcgtgtagagccaagcgttattgccgtcgaagagcagttcgcgcggcgtgcgggagtcgatgatatccacctcggtcatgccgtgttcgtaatcgatctcggtgatgcgggcttcgggatagttctgccgaatccactcctcgatgctcgtggcgggcttcgagggaatgtagtctccgtagtcgtagtcgggagccgagtccgtcagcatcttgaccagcacgccgtcagcagaatagtagaggtccacttcggtctcgatgccgttctcgcgtttctcgacctcgatgacgtagatcgtctccacgccttcgcgctccagcatgtccacatcgtccacgcgccacggagccgaggcgtattcgctctctgagaaagccgtctgaacagcgacaggaagcatcgagaactcgatgtccgtttcggtcatgtaccatgcgccgccattgtcgaaccatgcggccagatcgctgccggcctcggcgcgagatacgggaagcgaaaagctcgcaacgacgtaaccgcccttagtctgccagctgacattcgatgcagaaggatatttagccgcgagggccgcctgcgcctgctcgctgacggcgggctgtcggggagtgttttcggtcttttcgcaacttgccagagccaatgcgctcacgagcaaggtcataacaatagtgtttcttttcataagtcagtaataaatattgaatttttcagcccatttctcgcctcgacaattcgagcaaactcgattatgcccggcttaacgaaatggttcgtgttatacaatgtgttttctcatatgtttcggttttgcatcgactccgcatcaatgtcccttgcgggtaaatcccatcccgtcgtgacggtgacggcgctgcgactcgaagccctcgtcgtcatgctcggatgaaacagaatggaaaccttgaaaccacgcggaaaaaaggcccgctatccgatgcagaacgcgccgaggccaagggcggaagactccacgatccataggcgagatgtcaatcgtcttttccgtcgttgcgataaacgcacagcaccgacctcgaagataaggcccttcccgcgcgaaccggaccaatccctgcctatccagaatacataccgcgaaccgggacgcatctgctgcaagcccttttcgatgccggggaggaacgtcgaaagagccccttccgcacgtatgaaatcgccctgacccggctcgaactccggataacgggcaagaggtgtcgcggcaaagttcacatacacctcgtcatgagccgcgattacggctccgcgcccctctttaagcaccttatactgaaggccgggcaccaacgtgacgacgcctttaacgagggcattccggagaaagaaattcgtttcatcgaaatcgtccccctcgtcctcgtccgccccggcatcttcgcccacagcgatcatgcaggtgtcgatgaaccgttcggcaggaccgtcctccgtcgcggggatgtggaagatgaaatgcgcgccggggtgcatgagctgcaacccctcgtcataaaaccgaatgtaggtattcacatagtcgctgctgcgattgaatccactcttccaaatccacgcccccgaatcatccctgtcggcattgcgctgccagatgacaacccgatcggactcagtcgctcgcggaagtctcgtatcgcccgtatcgagaacgacgtagcgcaaaccgctcgccgtcgcgacgacgcccgcactgtcggccaaccactcgcagagaaacggtgcgaggtcgtagtccggaaactccggtggcgtatccctgtcgaagtcctgagctccgagaggcgccggcgacagcagcgctgccgccgaaaacgctgcaacgaagatttttgtgtataaaaagtctcccgaacatatcagtcgtcgtagccgatgacgttgaactgtgcgtcgaaggtgatctccagaccgcccgaaagcttgatttcccacgtgtagggattgcgctcgatctcccggataaactgtccgtcgaagagccggttcttggctacgaaatcggcgatctgcttgggaacgatggccgcgggaaccggagcgtacttgcgctcgacgctttcccacgatccgtcggcgcggaagtccacctccgtgcggtcggtgtacgtcacctcgtactcgacggtcataatcttatggtcggcgacgatataagccagcgtgaggtccttgaaatgagtcgtcaggaacgtctgagcagcctgcggcaggcggtcgaaggcaataggctcttcacggccgtcggcatgggccgacaaccgacctccgaataccagaacggcaataaaaagtaattttgcgatcgttttcataactaaatggttttaggttaataatccaaattctcgtgggttccggaaagtccacgctgcaaaggtcgcaaacgattctggagcgaatctgaaaccaaggcgcagggagcatgcgcccgaacccgatgatcgagcgtaaacttcgcaaagtccgttcgcatccacccgtagcggtatatccactcgttggcctcgatgatccggcggagacagcgataacaccggaaatgtttcatccctcccaaataggagtttatcgaagcggcaaatttcggagcctgtcgctctccgtaatgcgatcggctggcatcgagcatccgaagcaaccgccggatcacccgatggctcggatagatccgtccgggcttgacatagccgccgacgaacaacacaccccggtcggcgcgctgcaaatgaattttgttaggatgaagcgtcaaatgcaactcctcgcgcagaaaatcgcggatcacgggaatcaacgatttcagataagcccgatcctcgtgcacaatgaaaaagtcgtccacataacggccgtaatgacgcactttcagctcccgtttcatccactggtcgaagcgatccatgtagatattgctgaacaactgcgaagtcagattgccgatgggaagaccgcagtcgggcgcagcgcgaaaaagacttttgctcggagggaaatcggcccacacctttcgcgatccgcgcacgatgcagttttgcgtcgaatcgtggaaaatcacccgttcgagcagatagaacagcagctccgaatcgagcatgtaacgtccggccggctgcgcggcgcaatatgccgtccaatgacgttcgagataactgcgcagcatggcgtagaggatcttgcggtcgatagagaaaaagtagccctgcacgtcgagtttgagcacccagcacggccgcgaataattgcgcgaacaactgcggatatgatgatcgagccgccgaatggcgtaaagcgtccccctcccttttcggcacgaataggagtcggcgatgaaggtccgctcgaaaagcggagcgatctggtcatggatcagacggtgaacgatgcgatcccggaaattcgctccgaaaatctcgcgtttgatctccaactccgtcaacaggaaacaaatgctgcgcgaaggattataccgacgcgagacgatgtcgtcgtaaagctccagcagctcgtgctccatattcagctcgtagcggagctgattgaccgtattgcgtttgcctttccggacatcgaaatacgcttggaatagggtatccaaaagatcgtagttcataattctgcgttcttaaaaagagggtttgcctgttctcgcgcacacgctacggacacaacgcacggaatacaagttcgtcttgttgttgttcgtcaccgatgaaccggtaggcgtaacgctcatgtagaacgcgttgttgttgttgttggtcgtagccgaccagtaatagccgttgacgttagccgggctgccaccgttgccggcaagaggaaaacccgaagcaaccgctgtgagcccgggcgacgaaacggcggcgggagcgaagcccgcaccgcaggaagagtcgtcgcggcggcttcgtcggggcgaccgacgaaacagtaccggagccgaaaagcagcgggcgtcgccgacccgaaaagggaccggacaagcccgctgaaactccggcgggttactgaacaggcacggcacactccgcatgcaccccgcaggatgacgcggattccggcacgaaaccctctgtaatcgcatatcaatcatcctaaaaattctcaaaactcacaaaaaacacgcacaggcggcagctataaaagagggtttgcctgttctcgcgcacacgctacggacacaacgcacggaatacaagcctttgccgtaggtcgtcaccgatgaaccgctagggagaaggcccaggtagtacgcgtcgtacctggtgtcgtagctggtcgtagccgaccagtaatagccgttgacgttagccgggttgccaccgttgccggcaagaggaaaacccgaagcaaccgctgtgagcccgggcgacgaaacggcggcgggagcgaagcccgcaccgcaggaagagtcgtcgcggcggcttcgtcggggcgaccgacgaaacagtaccggagccgaaaagcagcgggcgtcgccgacccgaaaagggaccggacaagcccgctgaaactccggcgggttactgaacaggcacggctcgctccgcatacaccccgcaggatgacgcggattccggcacgaaaccctctgcaagtgttttcaaagatcgttcgattcgcccccgtccctgcggacgacagcgtttttggtcaggtatttgtcccatgcggccagttgcttggaaatcgcctcggaccgctcgctcaacaacacgtattgtttgagcgaaagctgtttcaggtcgtgaagaatccgcaggtagatcttcacctcctcgatatgctcccgacacagcgccacctcgcagagtttttcgcggcttcggttggcccggaacaggcagagcatcatcgtcatcagcatctttttcaggtcctcgccgatcgtgtagcggaaatcgcgctggaacgtccggctgaccgtatagacgcgcagcagcagatcgtaggcatccttaaataccggaagattctggtagtgcgccatagcatctcttttgaaccgattgcaggaacagcatgcactccagcggcgaggcgctctccaagcggaagcgcagcacgtcggcaaggatagcgcgcatcgaatccggcgtacaggtctgcgggagaatggcaggagtatccccgccttccttcccggagcgcacttcggcctgcggtgcggcattcgccgccttcggggtccgggccgccttgcgggcgtccgcctcggcagccgcacgctcggcctcgcggcaccaagcatcgtactcctgcgcatcgaatcccaaggccggggcgccgtaaatccgataatcctcgctgatttcggtctggatccactcggagttttcgccgaacacctcgccgagggcgaaaaacggaaatcccagcgagtagtaacgcccccgcttgcaatccgtcacgttgaccttgtagcgccgcacgtgttcggtgaaaagaaaagccgactcgttgtagagtttggcgaacattccctcgtgaaaaacgtgcattcgcggctgcgcggcatcgaaagaggataatttttcctgaatggtcatttttcaaaaaaattttcgacgcccaaagggcgtatttcaaccctgcggcctacaagccgcagggtaataatccaatcaatcgaattttcgcacacactaccgtgtcgtcgccgagttaaactcgtcagccgacacgctacggacacaacgcacggaatacaagttcgtcttggcgtagttcgtcaccgatgaaccggtaggcgtaacgctcatgtagaacgcggtgctgctgctgttggtcgtagccgaccagtaatagccgttgacgctagccgggatgccaccgtagccggcaagaggaaaataacagccgatataatcgcccgacaccttatctctggtttcggaaacgaggaacgcacgctgtttggagaaaataagtttcgtgctgaccagattcaagtgagcctgtgtcggaacgacccatttcgacttgtcggcggtcttataccacggcgagaacttgccgtcttcatccatgttcgtgctgccgtcggcgtcatccccgataagccaatacttctcgacaaagttcgcggttccggcgccgattttgccgcctgcgtcactccacggataatactcgcccttccagtctttgttgtcattttgcttcccggcgccagtaatgtccatcttcagatcattggtaaagtattttgcgtatgtgaagttattgccgccgttggcgatacgcataggggtacctacgttccggtcggcaaccagcagataattcgccccgtctttaatcaacacgtcgtttacgatgcatgacgtcttgatcgaaatggttatggagagtgtctgcggctggcctttatccgcgcttttcggttcggctttgatcgtgatcgtacctctgatcgtagggtcgccggggcccgttcggaacacgttgacgtagaacgattcgccgttctgtaatcctgtgagtttgtttaaacacgtcccatttgcggtccatcctgccgtgatcgtgctgttgtcagccctgtctttggagaggaacaagtcgtaatccttgttgaagtcggattccacgctatattggtagttcgtgggatcggccagattgactatgaacttcttctgcaccgagatgccgctcttcaccgtcgtgaccgtggggtcgaatccgttgatgaccagtccgtcctgaccttcgggaaccgaaggtgtcacggtcagcaggtagtccgatttgggctggacgaaggtcagcgtcaccggaggggtctccgcgtccaaggtcccggtataattcattcgggagactttcagcgtgaaggttctctcaccagcggaaatattggtcggaacgtccacttcgagcataccgccgttggcgcccgatgcagtccatgtgacgccgatattgctgcagctgttatccacgtcggccaccgtccattgcgaccgcttggagccggtctgcacctgcatgcggagcgtgccgcccgacccgggagctctgtattggacggtcccgatctggttgtccaccatcagcacctttacctcgtccttggacgaaagctgcattacgtcgatcacggccgtcagcggactactcgggttcacggtgccgccggtagccttgacggccagacgcgccttgcgtaaaaattcggtggcgttgtcctctttcgtgcggatcgagaacgacccgttgtcgttgctgcgcacgtaggtaaacttggcgtagtccggggcatcggcagcgttctgaatccactcgaccttccacgtaagtccctccttgacctgcaccttgaccgtctcgctgaggtctttctccccggcgaacgaaaccatggcgcgggaaatggtcaggaagttgccccgctcgtcggtgacggtcgtattgtcgtcgtccttccatgagtcgctgaccgtgtagtcgagcaacggtgcgctggcgtcctcggcctcgctctcgctcgaagccccggggccgctcacgcggttgatgatgccccggtagaagtggttgcggcgcagaagctggctgcggccgttctcggccatgttgaagcggtaataggtcagcttttgcttggggttggaggccgtattcaccgtgccgtcctgatagtatccggcgatcatcaggtaggtggtagccttgtcgttctgcacgaccacgggcaccatgttcggaaaggcgtagatctgcgccctcacctcctgacgcttggaaccgtctgtcaggtcggcaggagttcccacggtaatccacttgccgtcgttgatgccgcccagttcctccccgctggcgggagcccacggcacgtcgttatggaagtagtagcctcccttgcggaaatgcaccagcttgaccttctcgatgataaggtctttagcggcgtcatgccgcaggtcgagacggcatacgctccgccagaagcggagggtgcccgaaaaggtgtagcccgactgggcgttgcccgagaagctcaggtcgctctcgttgcccagtccgtcctgcacctcgccccacatgggcaggacgatggaacccgaggcgcccgaaccttccaggtgaacggagttcaccacggcgtagaggtcctgccggatggtctgatagctgccgctggcggcggtctggttcagataagcgtcgaaggtgctgtaacccgtgggcacgtggtcgtgggcgttgccgatcaccagcgtccggtacgattcaccggccgtcaggcccttcgggatcgggaacgagacgtagctcgacccggcggagacgttggcgtgctggtaggtgatgtagttgccgtcctgggtgaagaacagcacgtgcacgtccttcaggttgcgttcgtgagggtcggtggccacggcgcgcgtgaccgcctccatgccgtcgatcgagaaagctatacgcaactccccggaactgcccgcatcggggcctgcgagcggatccgtatcgtcccgcacgcaccccgcaacggcggcggagaccagcaatcccgcgaggaacttgccgaggcggccgccgaatcggtatttcattctgttttgcatgtcattctaatgtttttttatatacattgacccggatagggtgtctaaaagtcgttctcgacgtcgcccccgttctcccactcggtgtccgaataggggtgttggtacaggttgaccaccagttcgagccgtccgatgcggatcgtcagcacctcgtgccgcttttggctgcctgcgggcaaggcctctttcgtacggatggtcagcttgcctccctgatcggtcacggcgtcggggctgtcggcgggcttggtcacctcgaagtggctgcccgaaacggaggcatcggtcagttccgcgctggtggcagtgccgttcggcagcgagaactgcatgctccactgcgacggcttgacgttgctcagcagttgcagcagcgcctcgacgccctgtccgtcgttcaggtgcacctccttacgctccacggacgcccagttcgtcccgtcgaaggcgatgttctggttgttgtccgtccaggtgatgatctcggcggtgacgtccgccgtccgggactcgtaagccttgtcgggagtctcctcgccacgtcccatcacctgcgtgatgcggacgttgtaacggtggttgcgcagcacgtccatcagcttgcccgacggagtgccgccactggccggggttccctccttgaagtcgatgcggtagtaggtggtcggggcgttcccatccgggtatttcccgcccaccacaatggcgcagcggttcaggtggttgacgtccccgggcgtgccgtcgcccttcaggatgacgtccgattccggaatatagatcgagtagtcgatctggtttccggcaacgacgtacttccagttcggggtgagtatggtcgttccggcaggtacggacggggtcgtaaccttgtgtccggaggcatcgtagctgtccagcttaggcatcaccgacagcctgttgttgggcttgtagatgtgaacctccgtgagcgtgaagttcgagactttctcacccacggcgacgtccacgcgggcgacgctgcgaagcagcggtacggaaagtttctgctgcggtgtcgatgggatgaggtcctcgttggccttgccccacatggcgaagcctgcggtgttgtccgcatggagtttgtccgtcacggactgcatgagttccgcttgcagggcttcgtaggtctttccccgccacgactgccatgtctgggcatcgtacctgtcggcgacgttggccagcacgatgcacgtgaacggctcggaggcgagggcgctctctacggagaagctcgtctcgaacgtgtacgttttgccgtcatcgggcttggcggtcagcttgctgcccttggccacggaatgcagcttcagcccgtccttccggaagaacagcacgagcacgttgtcgatgcgggtttcgtccccggcggtcagcgcacggctgatgctcccggactcgggcgcccggagcaggatctcgacccgcacggagttccccgcagagggaccgtccggcatcggatcttcgccgtcgcgcacgcacgaaaccgcgagaacgcacaagacggcgatcagccatctcactgtgcatttgcctttggtatatttcttaatgtctatcatcttgttctctgttagtccacttctctgtgtccagctatcacagaccgccgttcatgtcgataacgtgccagtcgttcacgaagattgcgacgctgaagttgccgtcgggctgaagctgcgactccagacgtatgacgaactcgtcgtccaggtcgaggtccacggcgggattggccgacagcagttccgagaggctcccgtcgaagatcacgccggagaggccccgtccgctgtcgtcgggaagcacctcgacgtgcagccgcgagtcgtcgccctcggccagacgcagcaccgtgaacttatggatggagcggtcgctctcccgactcgattccggaagccacaccacggggttttcgtcccgcgtgcggccttcaaagtcgtacgtcccgttcgacgcgctgatcgtgcaggagagcctcggaaactgctcgtcccgaaggcccgaaacctcgacgcgcacgtcgttgctcagtttgtgcaggtccatcggatgcggagcctgcaactcgccggtgacggtcagtccgcggccgatctcgtaccacaggtgttcgggcttctgctcgatgctcgacccgtcagagagggtctgtatcgacaggcggctttgcggaaaccgttcgctcgaaaggacccggtatcgttcgccttccgaacatccccatgctacggcatggtaggagccgggggccacgttccatgtgaacgtattgtccggcccgaggtccttgctgcgggcgacggccgaggctttcagttccccgctccgggaatcgaacaggtacaggcgcacctgttcgacctcggcggagaaaaggtcccggccttcgcggttgtaggtatagctgaactgcaggcgaagcggaaaaaggcagtcgtcccggttatcccggacacaaccgcaaaggaaggaggcccctccgaaaaggaggagcgctcttctcattacatacaaagcctttttctgcatagttgtgcggattggttagcccagcggctcgttcatatccactaccgtccacggttcgatcgtgatgtcggccgagatgtgggtctgggtttccagcggagtggtcggttcggtcggaatcgtaccagcggcagtattgaagcccaggttgctgatctcggtaatattgaccttgtagtaatggttgcggttcacagcgtacttcttggtcagagtggtctcgcggatgtcgcggatattgaggcggtagtagcttataccattggtatatgtcagcacctcgtaatcaaccagttcgccctgcgtagccttgtacgtagtagcatcggcctcttgtttgaaatagaggatctggttgtctttgagggcgaaggtgatcttacccgaagcgagttctttcttggccagcacgtagaatgttgtgccgggcgtcaaggctgtttgggttacattaccggtagcgtctgctgttgcctggggagtaacctgcaggctgaccagcacgtaagaggtattaccggtagtcggagcctcgttgacgttctcggccaggtactgcgaattagcgaaggtattgtcatacgtcgtcaaaccgttcgtccacttgatagcgtctgtctgcagtttcgtcaggtggtcgtaagtgccgtctctgtcagcatcggtctgctcggcggttttacccttgggcgagaactctcctgcagtgagtttggcgaggtacgtctgggaattctgctgtgccagcgtgaacttggcatcggcgacggtggcattaacgaccggcttcacgggaacgttagtcacgaactgcatctgcactttggcggcgccgcgagcgacggagatcttgatgagattggcgtcttgggtagcctcatcctccgtccgctcggtcagggtagcttccgtcttaccggccatgaagaagccgttctcttcggcgatatccgtagcagcgatcaactgtttctcgaaatcgctctgcagcgagccgatagctccctgagcattgttgtagttggccacggcgtagatcgtcttggtgccggtagtcgtagcgagggccgtagtgcctttattgtctgtattcagagtaatccggcccttagtctccaagaccccgccgttgaagatgtagatgttgaggtcgctgatttttgtctctgttgctacggcgttgggatcggtggaagcggcgcgcgtactctgattcagaagagacaccgagaacgaagcgtacgtcttgactccggcttccggggtaacacggttgccaccgtcttccttgttgcatcctacagccagcagcatcgtcgaaagcatgccagcgataatcgatttggttttcataaaaataaatttaaaaagtgattaaaaaaaagtgaaaaaatagttattaatgtatcttgtcgtcaggattgttcgtccgtcgcccgcacggggtccgtcactccgtcttgacctcgtattccaccttgcactcgatgcgccgcagttcggggaagaactcccggaacatccaccggtaaggctctccgccatagagatccatcagtttgcgttcgcggccttcgtaaacgcccgtattgaggatgatgcgctcgatagcgttcttccacgccgtattgtcgctctgttcgaccagacgcagcagaccgctccaatcctctccgcggccggccgtgtgcatgatgtccttcatccacggatagaagtccagcaggtattcctgaagactgtgtgcacgggtgctcgacagccggtcgttgtattgggccgtaccttcgatcgaacagtaacccgtcaaagaaatacgctggatgacgaccgtcgaatctccctgtatccggtcaatgaactctttgaaagcggccaggcgctccccattgtcggccagtgtacgcacgattttggcgctgccagcctcgtactgcaaatgcaggacgtaagtttcgttgcggaacattcggggtggctcagaagcatggataacgacggtatcacgaatgataaccgtgtcgcgcacgatgcgctcctcgatgatgggcttcggagcgttgagcgcagcgaggcgggcggcctcggccatgcgtttcttcttcccgaaacggtaaatgagattcagcgccaacttcgtgggaccgacgtaatgcttcgtaccggaaccgatgcgcaccccgcagttattcgggcaatactcgtcatactcggtatagatataacccacgccgatctggccctccataccccaccgttcggagaagttccaccggtaaccgtacgtaaggccggcgccggcagcccacccctcatgacgctgtgcgccggtggagggatagaagttaaacggaaggtgcaccttattaaggttgtactccccgcccagcaggtgtatgcccacaaaatggccccgctgccgggccttggtccagaagcggaactccggctgcaccatccagtgtttccacttgcggttatcgctcagcgtccacccgttgtagttgccggacacgtccatcgaccacctgcggccgagcgggaattccacgcccagattgaccgtggccgccgcgtcgtaaatcaggttcgtcttcaagccgacctcacggcaggtccgcgagcgctccaacgtatcgacgccggcacccaccgggtctgcggagagtaattcccctccggaaacccaagaaccgcatgcgagcagcaacaatgataaaatcagtctctttattctcataagcagcaaatattgtttttcaatcatccttggaggttcgatacgtgtcggccacctcacgggtccgatccattacggacggtccggcgacggagagacgcccgccccaagaatcggcatgcaagagctccgaacggcgacgaagccgcgtaggcgtctgtccgaagtattgtttgcagaaagtggtaaagtaggaaggcgtagcaaacccgtagtccgcagcgatctcggcgatgcacttatccgtattgcgaatctcgtgaaagatatgctcggcacggcgctcgttgagccactcgtgcaccgagcgtttgaattcggccttgaacttgcgttggaaactgcgcacgctcatgttcgcgagggccgcaaagcccctcacgtcgcagacatcgcggtaatgctggaagatgaaatccttgaagttgtcgttatagcccacgacataatgcaacagggcgtacaactcttccggcgcgtggtagccgcgaagaagaatacacaactcctcctgtttgaccttatggtaatggatgcagttcaggccgtcgtccaaagccccggacaacgacgagaaaaatgccgcaacaggctctttaactgttaattgcggaacagttcggagggggggggatttttacagacctcgcgcgacaaatccaagaaagagtatttgttgcaaagcggcagctgcccagaaaagaagcaggccactaagcggctgccggatacggacgcacctgagaagcgaagattcttgggaacgagaagcaacgcacccaccccgacacactgaggcgggaaaagcccccactccacgagcaggcgaccttcggcgatgtagagcagcacgctacggttctcgtcctgaaacgacagcacctcgcccgccgacaaccggtactgtcggaaaagagaggtcgaatccgaagcgtaattctcgcagtccaagtgagtttctatgtcgcaaaggggcataaggatcaaacttctggtttttgatggcaaaattacaatatcttacaccaattatgttttcgaaaacgcgacaaaaaatttcgtaaatccgacaaaagagcctgtttataaggcacatgggccaaacaggcttgccgaaaattacacaaacacgacattgtgcgggagaaaacaggcggcaatcaaaagaaaaaccgatgctgtcgagcaccggttggaacaacccggaaaaaggggatcatgcaggatgcgaaacaaccctttccgcattttcttgggagggggggggctaacgaaatacgtccgagcgcagggaggacgtccccgcagggaacgggaggagatcgtccgagctccgcgaggaaagctcctcccggaagccggagatcgccctgccccggcagggaagctccggcgccctaatatatcgtattttccaagcagctgttttcgaaaaatgccgcatcccacggaaagagtccgaagcaaggtcatttcaaaggcttttgccgtcgctgccgttcgggggccttttttcgatttttccgggaagggggattttccgtcgcaaaagtcacggcggagcgtaaattatcgctgtcagggtgtaaaaacgttcgacaaatgtgttttttttttgcacaaaagatgtcggtaaaatgtgacgccctcttggtggcaccctattaaaacagagaaacgacatggagataagaagagagatgcggggaagataccgttgaaaaagaacttttgagaatttatcgggtttatgccacatggggcggcagttccgtattttggtcaaaatatagtcctctcttttattatcctaataatgccgaaacaacagactgattccaagtctcgtgaaaagaccggcaaacgatgattgtcggtcttttcacgttcgaacgccgtcctattaagcggcagcctttcacaggcgaccgggcattatattactatcggcgtctcgaataatcaacggtcgattccatcacacgataggataccttgcgtgtaataccactgctttccacagctaaaaattgatacggttgccttcggcgaaaagcgaatcgagaagcccacagagttccgactccagctcctctccgtcgagatcgccgcatatggtaaagaatttcccctgcggggtgcaatactgcaccgtactgacgacggcacaggattccgcaccgcagataatgaccgcatcgacatcctcttcgtggcgcagcatggcgttgtagaaagccagaaggtagcgcggagcatcgatcggcggaaccagcatcatcgtgcccgacacgtcgaacttgtcgggtgaattcaccactttcaggccgtatcgtccggcgatttcttcggccgtcgcggccggaactccatacagtaagatattcataactgttattttagaaaaaggcgcggccgactactaatctctatgcaatgacttgttatggcagtaacgggtctttgttcgccgcgcctttttggggttatctgaaaatcaaaattaaaagctgagccgccaacacccgcaggaacatcgacaacgggtagaccgtggcatatcccaccgaaggggcgtcggaggtggtctgttcggtcgaataggccagcgccgacggattggtcgaggcgcccgaaagcacgccgatcagcgtatagtagttgagtttgtagcgatagcgtccgaaaatgcccgccagcagcagcggcacgaccgtgatcacggcgccgtaggcgatccagacatatccgcccgcgacgagcgtcggcacgaaatcctcgcccgcacccagccccacgcccgcgaggaagagcgaaatgcccacttcgcgcagcatcagattggccgacatcgtcgtgtaggtgatgagccggtaatgcggcccgtagcggccgatcaggatggcgacgatcagcggaccgccggccagccccagtttcacgggctggggcacccccggaatccagaacgaaatgctgcccaggacgacacccaacgcaatgccgatgaaaatggggatcagattgggatggttgagccgtttgagcgagttgccgaaaagccgttcggcatgggccaccgacagttcggagcccacgaccgtcacccggtcgcccagctgcaactgcaagttccccgccgccaccaggtcgatgcccgaacggttgatgcgcgtgatggtgacgccgctcgacgagcggacgcgcagttcggcgagcgtcttgccgttcagctcgggtttggtgatcaggatgcgccgcgagatcatcttcgggtcctgtatcatctgctcggcgtccacttcgcggccgagcagagcgaccagcgcctcgacatccttgggcgccgccacgagcaaaatccggtcgccgcagcggagcgtcgtcgcagcgtcggccagttcgggagctccgcccggacggcagatgcgcgacacaacgaagtcgcgcagggccagatgccgtattccggagatgcttttgccctcgatggccggattgcagacttcgacggagatccgccgggtcgtcaggtctttcagaacgtccgtgcccagcccggccgcctcttcctcctgccgcacgtcgatgcgcagcaggcagcgcagtgccagcagggtcaggatggctccgacgacaccgagcggataagccagcgcataacccattgcgatatcaggcgcatcggccccggcatgcatgtcgctgaaagcctgctgcgcggcgcccagaccgggcgtattcgtaacggcgcccgacatcacgccgaccatcgtcgtcatgggaagtccggtgacataatagagggcaaccgtcgtaacgatgccgagtgccacaaccagcacagccagtttgttgagcgtgatgccgcccttgcggaaggaggagaaaaatcccggtccgacctgcaaaccgatagaatagacgaagagaatcaggccgaactctttgaggaagtgcatcagatgttggtcgatgttcatgccgaaataactgaaggcaatgccgacgaacagaatgcccgttacgcccagcgacactccggcaaccttcaccttgcccagaacaatgccgaaggcgacgaccaacgccagcaccagcaccgaatgagccacaccgcctccccaaagcgactcggaaccaaacaacaacctttcgagcaattccataccgaatcccgttttaggccgagctgtccccgcaaagcgaaacccgtgtgccgaaaacggcacagcagccccaagaacaacctcggaattaaaattatcatgcaatacacaaccgatatcgaatgcccattcctcggggtcctccgacgtcgaatcgatctggcaggtcttctgactgactcctgttccgaagccttcccggtcgtaagaccagtggctaagatgttcggaactttctgcggagcttcacagcagcgggactgtccgggatttacacccgattcccttttcattccctcccctgtacggggaacaggaaaccaaatctgagggcaaagataacggtttattttgaaatgccatttcgaactccgattttttcactgcaaaaccgatgaagtcggaagaaacgtttattttttatcttatggaattccatccctgctacacggccgaagattttactgcatcgctgtccgtttccgactacattgcgcgcttccgcgatgtcgaacgtatcgggaattattgtatcgcctgcccccaactacggccgcagttgggggtgtccgccattccgattcgatgtcggggaatactttgcggaatatacttccgcattgctcgtcgccacaaaaatcaccccgctcgttcccaatcttccgatctcggattcaatgacgttgatccgcgccgaacgtatccggctcgaacagcggctactcgaaatggaacaccaatacgacggacgagcgtttacctatgtcggaagctgtctttactgcccgaagggaacctgcacgcgcactgatggaaagccctgccgtcatcccaacttggtgaggccgtcgctcgaagcgtgtggattcgacatcgtacgcacaacctccgaactgttcggcatcgaactaaaatggggcgaggagggacggctgcctgagtatctgactcttgtttgcggattcttccacaatgcggataatgtaatatggaacggataaaggccgtttcagtcaaggtcagtcaaggaatgtccgggtcttgtgtgaaaagcatcttacccggaagctggtgaacgctttgtactcggcagataagctccggcgccctaccctcttatcgaaggcatcaggcgggacggtatatgatgcggtgtatgtgttgacagtggtttacggggcagtttgcaggagcgggcggtattccggatggaaagcggcacgggctacgcaaaaggcaatcggatgtagcgagcatccatggaagaataggtcaaaaccgctgtttctttcgccgccgtcgctggattctttgctgttcttcataagcccgcgcatcggccaagtccaacagcgtgtcgacaactcctgagacaggatttgccgtgcggcttcgttgttcgtattggcgttccgcgtgttgatcttctttttgggaggtcgggaacagctcgttgaaaacacgggccgagaattcttttcccagcaccgaaccgttggcgacaatgccattggtgtggtcgataaacgttacgccgtagattctgcccacggggttgatacggaatacagtgtcgataccgtccaccttcaacagttgccggaactcgtcccgtgtattgtgcgaactcatggcatctttgaccgtatggcgcaaatggtcgagcgctcccggtgctttcagtttttcctttgattttgcataatacgtttgcagggcattataacctacgtctttccctattttactcgacttgaagggcgtacccgttccatagccgtcgtcggtcatggctccgtagacaatacccgcataatttctgccttcgatcgttcccgtacgttcctcgactgagacgttgaacagttccagcagcgtgcggaactcgccgtaggacgagcatttataattccgcaggcacaacctgacgacggatgagatctgttgtttgacgtttcccgccttataatttactttccgaagatcgggagtgtccctctgttcctgacctttgaccgccggatggaggttgtacttatgttccaaatcgcgggtaatttccgcagaacgacgggcttcgaaatcgtgtggtagtttacagcctttctcatcgacgcgcaacgatacgatgtggaggtgctgccgatcaatgtccttatgtttgaagacgatatagggctgatctccgtaacccatcttctgcatgtattcatttgcgatttcccgcaactgttcgtctgtcagcctgtcttccggtgaagggttcagcgaagcatggaagaccgtattggtcgttctgcggttggcttcgaggtagggccagaaactatccatgcaggcatcgatatccagtcgtccgtgtttatcgaacggttcgagcatcttctgccaaagcagcacctcggcttcatccttatccactttctccttgttatagcgcaaagccccaccgggcgaggagcccgatcttatattcgcaaccactccttagcttgttttgcgaggttcagaatctcgatactgagggctttcagctctctcgttcgctgttccaatgcagcgatctgatgcgggatcgcgacgttggagaagtgcgcattgatggcctttacaatctggttgtagttgttcgcaagtttctggaattggaaataaaaatcattcagccgggcgacgaattgtgtcttcgatgggtcgcgtttgacgacgacgaactcctcgttgaagattcttttgacgataaaccggctgcggttatgctccaatcctgccttacaaagcatctgcttaaagcggatattctcttccgtggtgagtttgaaattatacctgtggactctgggatctgtcgttgtcgggcgtccgatcctctttttcgtggttgtcatcagtctggtagtttaagtggcgtgactcgggaacgccacccagcctcgcagagcgagcacctttcgtatgccgaaaaacttttcggcatacaaaggtacagctcgctcgcctcaagtgaggcgaaaaatccgcgccggagaatctctgaccgaaatttcgaaaatcctccattacggcttccggggccgggtctgttcccggtgcaatattacaaccgtttcggggcaaaaaaaatccatcggtgcggactggagcggactggagcggacatcgcagccgggttggaaaatgaagatgtatattgcggcagaaagaattattcggataaacaaacggatgattaagtcgatatttatcgggttcgctactcaatcaaacagacgattcgataaggaagcggagaagagcagaattaaaaaaataaatatataaataaacccatatatgtacgatagtttatcgaaacagacatcaatagaaaacattacccatataaataattcttaacatattcaaatgatggaacctgtaaacatttcaatctgcaatcagaaaggcggcatcggaaaatccacattcacggtattgctggccagctacctgcattacactttggggcatgacgttcttgtcgtggactgcgactatccgcaatggtcgatccatgcccagcgcgaacgcgaactggcagtcgtggagcacagcgactactacaagctgatgatggtacgccagttcaaggctacgggtcggaaattgtggcccttgctgaagtgtatgcctcccgaggctcccgaagaggtggagcgcatccggcaaaacggttatctgccgcgcgtaattctctacgacctgccgggaaccgtaaatgccgggggcgtgatccggatactttcctccttagatgccgtcttcattcctttgaaggccgacaaactcgtcatggagagttcccttacgttcgcacggggaatagagcatggattcgttcaggacaaggacacctcattgcaggccgcccatcttttctggacgatgatcgaccgtcgggagcgtactcctctttacgatcagtatgaggcgatcattcataaactcggattgtcgctcatggcgacgcatgttcccttccgttcgaaattcaacaaggaactgctgcccgacggctcgggtatctgtcgttcgacacttctggctccggagcgcatcttcgcccgcgaagcgcagatcgaggcactggcggcagaaatcctcgaaatccttaaaatacgataattatggccaagaaaccgaaaatcgaagtcgacgaagacctcatgcgccagatgatcgccgggcaggcgcctcttacctcgaaagtcgtccggcgaatccccgacgacgaacctgaagatactcacgatgcgccccgggagacctcggatgcagaagaacaatcgccaccttcggacgacgggtctgaatcccggcatcggcgaatgatccccgcacccgattacgaacggacttttctcgctccggcaaactttgacaacagggcctcgctgtatgtcggtacggcaaccaagcgcaaacttctggaaatattcaaaagaatcggcggggagcgtctgaccgcaacagcctatatagacaatattctgcggtatcatatcgaagttttccgcgaagagataaaccgcatttacaaaaaacgcaatcccaaaaatatcgtttaacaatccaaaaactttcgaatcgtgtattacgatcttttttccgagccgcacctattcggtattccgcccctcacggcactgcttcttgcatcaatttttattcggaggcttccggctttttccttacggcaagctgccatgacaacctcatcccttctccagcctgcggtcgcaacgaaaacacctgccattaggattccttcggcggcagcctgtcttaaaaccatgacgaaagcagcctcctccgggcagggcattgccggcactgcgcatgtaaaacccggcggtgcggtggcaaaggcgccgaaatcccggcgtcggaggactgccgtccccgatttcgaacagacctttatgaacttaatggagatcaggcagcgtgcagcactctatgtcagcatcggaaccaaacgtaaaattctggaagtcgtaaagaaaatcggcggggagtatatgaccgcaacttcttatgtcgagaatatcctgcggcagcatctcgaattgtataaagacgatatcaaccgcattcacaaagagcaaaacacaaaagaacttttataatgatgaatatgctcgcaattgtaatcagcctgctatgtgccggcttcgtacttttccaacgacattttttcggtcttcccggacagagtcgggagaaaccgtccaaaccgaggaattccagatcggagccaccacatgccaaatccctggttccgagttccgaaattctcgtgtcaaaatcctatcggagcggactggagcggacaggggcggacatcggcaccgccccggcaggcggagatgctatatttgccccggcttcggaagagaagtccgcgatggcgtcgtggaacgggcttgtcgtgcagcccccgatcggcgaagacggcgaacttgcggagcccaaagcgcctgccggcgcccgacctccgcttccggctctccccgccagagcagaactccgtgacgcggaggttcatgcgatgctcggagagctggacttcggagagagcgccgtcatgggcgatgccacggccgaggagcggcaggccattgccaacttcgacatccgggcctatgcttaattaaaaacgacctacgacatgaaatggaataacgaatacggctgacgccttttccgcagcaggaaatacgatgtatccggtcgcagaatgctcccaaagcaggctgcggcctttttcacacccttaaccaaactacttgaacgatgaaaaaaagagcaattttcatgattttctccctgtgctccgcactcgcctgctttgcacagggcaacggcatggccggcatcagcgaggccacgaacatggtaacgtcctatttcgacccgctaacgaaactgatcttcgccgtcgcggcaatcctcggactggtcggcggcgtgcgcgtctactcgaaattctcgtcgggtgacccggacgcttcgaaatccgccacggcgctgtttctctcatgcgtctttctggtgatcgtcggtacggtcttacgttcgttcttcctctaaacgatggcggaataccaagtgaacaagggagtcggccgtcaagtcgagtttcagggcgcgcacgtaatggttctttggcaaatgcgtcgatagcaagacgttaggcaagtgttcgatagcctatcatcgatcggcttatccgaaagggaaaccggacggggagtatagcctgccgataaactgataagtcatacagttaccaagtatgcgactgaatcaggagatgaaagatagatacgaggataaagtctggattgattgaacgatagtccaagtggcacaactcgaaactgtggcggaaggtaactacagacgccatactgtaacacactcgattcgaccttggagggttgggtgcagaacaggttacagcacaactgcgataagcagaaacggatgaaagtcgtatccgacaatctatcaaagctatgttgccgaagaattaaacgtggattgcctaacccggaatgccgaaaggctattaggtttcagacctatgaaaatccggtatggcaacggagccaccgtagtagtccgagcgagggaaagcctcgtacatggcgaagggtggcagctaacatttttaatacaaattaacggataatgtgtgagacattatgagaaatccagagagagtattaaacagtctgtcagagcacagcaaagtttcgagctacaagtttgaacggctctacagggttctattcaattcggagatgtttctcctcgcctaccataatatacaaggtaggcagggaaatatgacggaaggttccgacggtaaaactatcgacggaatgagcctgaaacggattgaaaatttgattgatgcgctcaaagatgagtcgtaccaaccaaaaccggcaagaaggacgtacatcccgaagaaaaacgggaacatgcgacctctcggcataccgtctatcgacgacaaattagtgcaggaggtattgcgaatgctgttggaagcaatttatgaaggtagttttgagaacacctcgcacggtttccgacccaaacgcagctgccacaccgcactgatacaggtgcagaagaattttactgcggccaagtggtttatcgagggcgacattgaaggattcttcgataacatcaaccatgatgtacttatcggaatcttgaaagaacgtatcgcagacgaccgctttatccggctaatgtggaaatttttgaaagctggctacatcgaagattggacatttcatagaacatacagcggaacaccgcaaggtggcatcattagcccgatactggctaatatctatctcgacaagctggataagtacatgaaagagtatgcctgtcaattcgatagaggcgacagacgggcaatgaaccttgagtacaaacggtattccaggaaaatttggtggctcggcacaaagctgaagcaaaccaaggataaagatactcggaaggaactgattgacgcgattaagcaacatcagaaaaacaggatgcacttaccctctgtcgatgaaatggacgagggatatagacggattaagtatgtgaggtatgccgatgattttattatcggagtgattggcagtaaatcggactgtgaggccatcaaagaggatattaagaatttcctcggcgagaaactgaaattgacgctctccgaagaaaagaccttaatcacgcacggcaatagaaaggcaaaattcctcggctatgaaatctatgtccgaccattcacggataagacgttaagaggcgagaaatcgggagtacttattaaggcttacggcaaaaaggtagtgttggaagtgccaatgtccacaatgcgggataaacttctctactacgaggcgatggaaattcatcaattcgagggtaaagcgaaatggaaacccacaagccggacaaagttgctacatctggacgacctcgaaatactggatgcctataacagagaaatccgaggttttgcaaactatttttctatcgcaaataacagttcacacctgaattctttcaagtacatcatgcaatacagtctgtataagacttttgcacgaaagtacagtacgacagcccgaaagattatcgcaaagtatcgacatcacaaagattttgcggttttctatgaggacaagaaaggaggaaagaagatgcgggtattcttcaacgggagctttaagcgtaaaacaaccgcgatggacgcgagttgtgattatgtagccaacacgattttcaataccactgtatcaagccttatacaaaggttaaaagcgggtaagtgtgaattgtgtggcgcaacggaaaacattgaaatacaccacgtcaaaagactcaaagacttaaaaggcaaagagccatggaaaatccaaatgattggacgtcagagaaagacgttagctgtatgtattccctgtcacaacaagatacatcacgggataatagactgaatatgttagtggagagccgtgtgcgccgagaggtgcaagcacggttcggaggcgagttcttggaaacctaccgtagaaatacggcaaggcaccgggttcttagcctacgactcacggcgcagtacctcgtgctgttcgtcgcggggcttctgggcgtcttcgtctgcttcgccggaatgtacatgagcggcgtcccgcagggcctgtgcatcctcttcgccctcacggccggccttgccgtcacgggcggcaccttctacctgaaccgccgtttcggcccccacgggcttcagaagctcatggcctcgcgccggcatccgcggcgcatcgttcaccgccgggccgtcgggcggctgttgcgttttcgtcgaaccgtaaaactgtaatcctatgcgcggaaccctgaaaacctcgaccttggaatcgaaatttccacttctgagagtcgagaacaactgcatcatctccaagttcgccgacatcactgcggcctaccgcgtcacactgcccgaactcttcaccctcacggccgaggaatacgaagcactgcacggcgcatggctcaaagccctgaaagtgctgccggattacaccgtcgtccacaaacaggacttctttatcgaagaacgatacacggctccggaggagggttccgagcggagctttctcgcccgctcttacgaacgtcatttcaacgagcggccctacctgcgccatacgtgctacctgttcgttacgaagaccacgcccgaacggatgcggcagaccagcgcctcgtccgtgctgtgccggggcttcatcgtcccgcgggagatgcgcgacacggatgccgtgacgcgctttctggaggccgcggagcagatggaacgcatcctgaacgattcgggcctcgtgcgcgtcgagcggcttacggaagcagagatcgtcggcacggcggacgacgccgggctgctggcccgttacttcgccctctcggacgaacagcgtccggtcgtcaacgaggatatccgtctcgacccggacgtgatgcgtatcggggacaaatacctctcgatgcacacgctctccgatctggacatgctgccgcagagcgtggcgacggatttccgctacgaacgcctctcgaccgaccgctcggactgccgcctctccttcgcggcgcccgtggggctgctgctctcctgcaaccatgtctacaatcaggtgatcttcctcgacgaccacgacgaaacgctcaagcggctcgaagcctcggcccggaacatgaactcgctggcggcctattcgcgctcgaacgccatcaaccgggagtgggtgcgatacgtcgctgtgtaagtaattgttaaacttagatttaacccgttgtttcgtcaacggtagcctatggacagatgcaccaatagtaatatactgtatcaaagctgtccagacaaggtagcccttccgaaaggagcagtcagaaccgtgagggaaagacaatggctgttagtatcatacagtcagggagcttggcttgggtggtatggttagcgtaagcgaactgtcgtctaaacgtcgtaaggttgaagaagccaaagatactgataggcttcagcccaaaagggaagcagtcggttattcctctccattctgggaatacacgaacagagtactgccggtgtaatagacagaacctaacccacttataagttacttgcacggaacgtagtaagcccgtatttctcctgccaatgacaggtaagcagaccgtaaggaatgccgaatggagtgcgggtataggattgcagaaaaagcgaatgccaccctgtaatggggtgaatagggattgaaacatcatcccgctgcgaaagcaggctgacttctgcggtaggtgattctttacaagaaacttttagaacttttaaaaggagaaaagcaaatgaacgaaattaaaaatcgtgtgcatcgactgaccaaacgcagagcaaatgggacagtataaattggctcaaatgcgaagctgcggttcaaaagctacaagcgcgtattgtaaaggctcaaaaagagggtcgccacaacaaggtcaaagccttgcagtggacactgacccactcgttttacgctaaagcattagcggtaagacgtgtaacttccaataatgggagtaaaacggctggcgtcgatatggtaacatggaaaacgccagatgctaaagtgtgtgcaataaccgaactgaaaaggagaggttatacaccccaacctctgagacgagtacatatcagaaagagtaacgggaaattaagaccattgggtataccaactatgaaagaccgggctatgcaggcattgtatctgatggcactggctcccgtagctgaaacaacggctgatgccaattcttatggtttcagaaaagaaaggagcacggcagatgccgttcaacaatgcttcaatgacctggcaaggacgacatccccacaatggatcttagaaggtgatatcaaaggttgtttcgaccatatcagtcatgaatggttgcttgacaatatccctatggataaagttttgctccgtaaatggttgaaaagtggatttattttcaacaagcaactttttccgacagaggagggaactcctcaaggcggcatcatctccccaactcttgcaaatatgactttggacggactggaaaaactgcttgccgatagctttccgataaaccgctcgaagaaaaattactatactcctatgataaatcttgttcgctacgcggatgattttattatcacaggagagagtaaggagttgttggagaaccatgttaaaccattagtcattgagtttcttcaagcaagagggcttaccttatcagaagaaaagactaagataactcatatagaagaagggtttgattttcttgggttcaatatcagaaaatataaaggcaagtttatcacaaaaccatccaagaagagtcgaaagagatttttagataaggttcgtgaaatagtggacaagaacaagtcttctaagcaacaatctttgatacgattgctaaacccagtcattagaggatgggcgaactactacaaggggtgttctgcatcggaaactttccgtaaaacagatgcacaaattttcaacaaactatggcgatggtctcgcagaagacatcccaaaaaaggtaaacgatggattgccaacaagtattatcacactgtaagaggtagaagctggacttttgccgtaccgcttgaaaacaggaaagtggataaataccacactcttgtgagattgtcggatacgaaaataaagcgacatatcaaaatccgcagtgaggccaacccatatgatgccgattggaaagatttcttcgatcaatacaagacccgaagaatgcttgcacacttagacggcaagcaatatatctatcgcctgtggaatcagcaaatgcaatgttgccctgtgtgtggcaagcacatcacacgggaaactccctggaaaattactgaaatgacagggagcagtagaaaggcgaaagtcctaatacatgatcattgcagccgaattactaacagaaataaatggaagttactatgagccggcttttagttacaaataaaagttttgaattgcttgagccgtatgaggggaaactctcacgtacggttcttagaggggaaagctcccgtaagggggctgacctactcgacatcgaaatgtacctcaatgaggcgcattcgcaggggctgcgctccgtaaggtgccactgcaacgtcatggcatgggccgagaacgaagcggagctgaagcgcatccgcaacgacgtgggctcgcagctcgcgctgatgggatgcacgccgcatcacaacacggtggacgtgccggtgctgttctgggcggcgattcccggcaacgaggccgacttccctgccgaggagagtttctacacctttctcgatcaggccctctgtcttttcaacggggagaccaactaccgctcgtcgctctcgcccttcggaatcaagatgtccgaccgcctgtcgggcattccgattcatctggatatctcggatcttccgatgaagcgcggcgtcatcacgaatcggaataaatttatcctcggaccgtcgggctcgggcaagagttatctgacgaaccatctggttcgtcagtactgggagcagggttcgcatatcctgctggtcgacacgggcaactcctaccaagggctctgctcgctgattcacgccaagaccaagggccgcgacggggtgtatttcacctacaccgaggaggcgcccatcgccttcaatcccttctatgtcgaggacggagtgtacgacgtggagaagcgcgagtcgctcaagacgctgctgctgaccctttggaaacgcgaatccgaggagccgacgcgctcggaggaggtggcgctctcgaacgccgtgaacctctacctctcgaagctccgcaccgaccgctccatcgtcccctcgttcgataccttttacgagttcgtcgaaaccgactaccggcggcttctggagcagaagcgcgtgcgcgagaaggatttcgacctcgaaaatttcctgaacgtgctggaaccttactataagggcggcgaatacgactacctgctgaactccgacaaacagcttgatttgctggacaagcgtttcatcgtcttcgagctggacaacatctcctcgaaccggacgctgctgccggtggtgacgctcatcatcatggagaccttcatctcgaagatgcggcggctgaaaggagtccgcaagatgattctcatcgaggagtgctggaaggccctcacctcggccaatatgagtgcatatattaggtatttgtttaaaaccgttcgcaagtatttcggcgaggcggtcgtggtgacgcaggaggtggacgacatcatctcgtcgcccatcgtcaaggagtcgatcatcaacaacgccgactgcaaaatccttttggaccagcgcaaatacctctcgaaattcgacggcatacaacgtctgctgggactgacggacaaggagcgggcgcagattctctctatcaacctctcgaacgatcctaaacgccgctataaggaagtgtggattgggctcggaggcgtgcagtcggcagtttatgccacggaaacctcggtcgaagaatatttgacctataccactgaggaatcggaaaagatgcaggtcatggagcttgccgaaaagctcggcggcgacatcgaagccgccatccagcagttggcatgcaagcgcgaaacgaaaaccgaatcttaatgcccgctgccatgaaacagttgctttggatatgcgccggcatcctgctgacgtttacggccgtgctcggagcgtttcacctcttctacgattacgaataccgcaaaatccgtcccctgtgcggagcatggcattcgacgctcgacgacacgcggctggtgatcgagccgtgcggtgataaattccgcatcaccatcacgcgccgcggcacgtccgaaacacatgctctgcactacaaggattgcgtctattatacggcctacggcggacgccggatcgatctcttttacacgcccccggccgatgcactgctcctcgtgccgggcgacgctttcaaacgaacctcaaaactcaaaaacaatgaacagtaaccaatcgacgcctgcgtcggccgtagcggcccttcagcaggagatcagaacccgcaccgaagtcatccgcactttggcagaccttcgggaacaactcgacgccgaccgtatctgcggagcgtggctctcggcggaaaacaacctctcggcctcgatacgccgcatcggcgagggcatgtggcgcatcctcgttttcgaccacgcgctctgctacaaacgcctcgtacaggacggcatcatcgcgctgcgccgccaccgtctttggctcggcgccgacgacggcaaccgcgtgatctacgatgcttccaccgagacactcaccatcggctgttacggacgtttcgttccggaggactgcatccggcggcaggaagacgacgcaatcagtgccgaagcgtgcgacttcaacgaaccggccgaataatggaaccgcgttcggtatttccgggctgccccggcaagcaggggcggcccttcggcagacgctgcccgcagtcacacatttctaaatccgacggctatggaatggaaagataggattgcacggctattccgccgcaagccggactgggaaagggagcatcgaagtaccctcattgcccgtcatgcagagaacctgctccgggaacgggatataagcaatgttacagatcttgtacgacggcaccggaaatcggatctgaccattgccggaatcgggctgacaatgaatacagcaacatcccgctttctcaggacgcccgaagatgcggccggagaagatgtactggcgctgatggaggccctgcgcggaacgccgtttgcgaaaaagatcgggtgccgcctcgcggacgttccggcaaacaccgcccactccctgcacggcctgctggccatgcacacctttctcttggatgcttatttggagcagcatcccgacagtgggctccggcagcctccgatggacgagttgcaggccgcagcgcatatcatcgaccggcagttccgcgccgagacattccgcgagctgcgccatctggcagaaacgagaggacgttatatgccctcctgttacgtcgtacgcctctacgactgggacgccgacatgggccggttgcagaagatgcgcgggcggctggacggcccggcatgtgcggacaatccgcagcaggtgcagcagctccgggagcgaatctggaaggccgagaaccgcatggtgcgggaagccgagaggatattagagagtgatccggaaatttccctgcggcaaacctacattgaaaaactcgatgccgagttgcagacattgggatggcttgcacgcttcccggagcgaatcgacgacagccgtattaaccggcagctgctcgacaaatacggtatcgagccgggcatctcccgcgaagaacaatcccggcaggtcgagaaagccttccgcgagctggatgcacgccttgtccgcatgaccgggcggcagtcctacgccgacgatctgttcgaatccctgcggcagaaaggcccgaagccggagaaacatatttccggggtgcggcagaaagagatcaattctgcaaggaaagagcaaaccggacaaccggcttcgggtcggcggataaagcggtgatgcccgtcttcgggtgaatatcctcaataacacaatcaattcaagcatgaaacagaaaatcatcctgctgtgtctgtgccttgtctgcacgggcctcagcacatacgcccagtgggtcgtctcagaccctacgaacctcgcgcaggggatcgtcaactccaccaagcaggtcgtcgaagccgccaagaacggctccaccatgctgcaaagctttcaggaaaccgtgaagatttatgagcaggggaagcgatactacgacgccctgaaatccgtcagcaacctcgtccgctcggcccgcaaggtgcagcagtgcatcctgctcgtgggcgaaatctcggacatctacgtcgacggttatcgccgcatggtcggcgacgagaacttcacgcccgcggagctcgcggccatcgccgcaggctacgcccgcatcatcgaggaatcggccggggaattgaaggagctgcaggacatcgtgaaccctacggatatgtccctgacggacaaggaccggatcgacgtggtgcagcgcgtctacggcgttctgcggcgccatcgagacctggcacgctactacacgcgcaagaacatctccatatccctgctgcgggccgcccggaagcgggacatggagggtgtgctctcattgtacggaaccgacgaacaacgttactggtagccgacgatggtacacatgctttcccttacggacaatctgcatacgattctccgggtgctttacgacgacatgatggcgctgtgctatccgatgtcgcaggtcgcaatggccatcgcagggatcggggcgctgcttcacatcgcctaccgcgtctggcagtcgatggcccaagccgaaccgatcgacctctttccccttatgcggcccttcgccatcggcatctgcatcctgttcttcccgacgctcgtgctgggaagcctgaacggcatactttcacccctggtaaaggcgacgcattcgctgatggtcgggcaaacactcgacatggaacaatggcaggagcggcgtgagcggctcgaactcgaaagccgcgagcagatgcccccggacagctactatgccgaagacgaggagatggaacgcgaactgaatgaactgggactcgacgaccagacgcagcaggccctcgatcgtatgaatgaacagcgttcctcatggtcggtcaaagggatcatcttcaaatgtctggcgtgggtactcgaactgctcttcgccgcggcgagcgtcatactcgacgtgctgaggactttttatctggtcgtattgagcctgctggggccgatcgcctttgccatctccgtgttcgacggatttcagtccacgctgacgcaatggctcacgaagtatgtctcgatctacctgtggctgccgatctcggatcttttctcggcgatcatcgcacgtctgcaaagtctcgccatgcgacacgatgccgaactgatggccggaggctacaactggtatgtggactggtcgaacagtctgaatctgatcttcatgctcgtagccgtctgcggatacctctgcatcccctcgatcgcctcgtgggtcgtgcaggcgaacggattcgccgcctataacaagaccgtctcgaaaatgacctcgctcgtaagcgccggagccggatggacggccggcaaagcatgggccggggccaaaggcgccggctcggcggcattatcgggcggtaaggccgtgggacgcggcatcatgaacggcgcccggcttattttcagaaaataaaataacccgttattatggaattcaagtgtttaacgaacatcgaaacatcgtttcggcagctgcgcatgtacgcgctcgtcttcgccggagtctgcgccgtcgttaccgtggcggcggtctggatgtcctactccttcgccgaacggcagcggcagaagatctacgtgctggacaacggacgctcgctgatggtggcgctctcgcaggacctcgcacagaaccgtcccgtagaggcccgcgagcatgtgcggcgcttccacgagctcttcttcaccctctcgcccgacaaggcagccatcgagtccaatgtcggacgcgccttgcagatggccgacaaaagcgccttatcctactacaaggttctgcaggaaaagggcttcttcaaccgcctgatcgcgggcaatgtttcgcagatggtcaaagtggacagcatccgctgcaatttcgaccgctatccctacgaggttacgacctttgcccggcagcgcatcctgcgcgaaagcaccgtcacggagcggtcgctcgtcacgacgtgccgtctggtgaacgtttcccgctcggacaacaacccgcagggcttcatggtcgaggcgctgaacatcgtcgaaacaaagacctcgcgacctatgaccgctaaaccgcactccctgcgctgccgcatccgctggatgcggcggtcgctgcgacgccggcatgacgcgctcgcaccccgcatccgggagcggatcgtactcgcggcgctcgtcctgctgctgctcctttacctttggctcctgttcgctatggacatggtaccggagctggagatcgggcatcccgaattattacatccaaaaccgtaaacgttatgacagaaaacaagaatccgggaaacgacccctcggcggagttcgaacggctgcgcaagcgcaaggtgctgctcttcgcggcgatcctcggatgcatcttcctcgtcgcgatgtggcttatattccgacctgcgcccgtcaagcctcaagaaggggccgcggggatcaacacgtcggttccggacggcaaggcgcaggccaccgtcagcgacaaacgcaaagccgcggaacagctccgcagcgaggagcagcagcagagacgcatgatgacactcggcgacaactcgttctcgctgctggacgacgggctcaaacctgccgaggagcctgcaccggcggacaaccccgcactgcgggcctccgaggccaaccgggccatgcagcggcaggtgcagggcttctacgccgctccgcagcgcaatgccgaggtcgaagccctgaaagagcaggtcgcagccctgcaatcccagctcgacgccgagcggcagcagcccgatccgctggaactggccgaggagcagtacaagctcgcccggaagtatctcggcggcggagtggccgtagatgaagaagctgttgagcaggcaaagcagcggaaggattcgcgcctgtcggtcatgcggcccgtgcgggagggtgaggtcgaagcatcgacgctcgacacacgggcggatttcaccgtcgaacgcaacttgggatttctcacggcggcaggtggcgtcgcgcatgccgatactccgaccgtcagagcctgcgtcgcctcgacgcaggtcatacgtgccggaagcaccgtgcaactgcggttgctggaagccgtgcgtatcgacggagtgaccatcccccggaatacgccgctatacagtcttgcgacgatctccggaatgcggctgcaggtcgtggtgtcgtccgtcgaatacggcggacggatcttcgccgtcgaagccgtagcttacgacatggacggccagccggggctcaacgtcccgaactcccgcgagcggacggccctcaaagaggcgctggcatccgtcgggcagactgccggcacgagcgtaaacgtcacccgttcggccggacagcagatgttgtccgaactggcgcgcggaggattgcaggcttcgtcgcagtatgtcgccgggaagctccgcgaggtgaagataaccctcaaagccaaccatcagctattattgatttcaaaacagcagtaaaatgaaaagagaccttatttatctggccctgatcgtcgccgcaatcacggcggtaaaggttacggcacgaacgacaccggaaacgccggcggagatccggcccctgcgtatcgaagcgggattcaccaagactgtacacatcctcttcccgtcgcccgtcacgtatatcgacatcggctcgatggacatcatagcaggcaaggccgacggggccgaaaacgtcgtgcgggtgaaggcggccgtgcggaatttcgcagcagaaacaaacctgacggtcatcaccgaagacggcggatttttcacgttcgatgtccactatgccgagaacccggttgtctcgaccctcaatcttacagtgcaggaaccgcagacggaaggtgtgaagaaaccggctgccgcgggctatccgcagccgacggccccagcatccgaaggccgggtgctgctgcgcgaggtaggccgagagaagcccgcgaccataaaacgcatgttgagcgacatataccggcagaaccgtacggacgtaaagggcattcgcacgaagaagtacggcatcggggtcgaggtgctgggaatttacgtctccaacgatgtcgtttacatacatacttgtatgtataacgacacgaatatctctttcgaagtggatgcacgacagtttatcgtagccgacaagaagctcgcaaagcgtacggcacagcagcagacaccgctcgaaatcctgcgcgtatgcaacgatccggccgttgtaaggggacatcagcgtcagcggacggtattcgcgctgcccaagctcacaatcgccgacgacaaggtgctcttattggagatcatcgaaaagaatggagcccggcatcagactaccgaaattccgagccgggagatttcgaatgccaaggtgctataaaatgactggtttatgaaaacaccgggagggggctgtccgaaatttcggacagccccctcccttcattaacgagtcgcgtcacctcaccccgacgggtgatttctcgcccaaacagattatcaggcatttcaataacttttcggcatgtatccggcagatcgattcctctttgaatatatgttgaaaagccttatcgaacgcatcccagagtattaggctatcccttgttttagaagattgttatcgtcgcatcatgaaagatatcagttttatcaagttccacaggatcatgaaaggggctgtgaaaaagccgacaattacggaaaggagtaatttaagcacgtaatagatcgcccaagccgtcaaatctccctgcaccaatcgccagccgacgacagagttcaagaactgccagccggagaccacggccatcagcgtataaccgctggcaaatctcccgtcgggaaatccattcccttccatgaaattcaatttatatcccaggatgaacagcccgacataaacaagcagatgaaaaacaatcgagccgacagtctggcttctcaatttttcatggcatgcggcgcatacgggttttggctggttttgtacgcattgtacacacagtccttttccgcattccgtacattgggcgactgccgcttcggcaggatgatttgcacaattcataaatcaaggttaacggtttcgtatgcaaaaataattttttctgcctaaaaaatacgctggtgcaaaagaaaaaccagtgcaatatcatccttcgccctgatccgaaaatttgggaaaacgaccgatattttttatatttggaaggatcgaatgcgcttttaatacattcggtcacagatgtataacattcggtcgttttataacctttcggatatgacaatcgagaaactggacggcacttcgccccgcctttatacactcgtcgctccgctggtcatgcgacgcagcgtgctgcgccagaacaacaactatccgttctggacctcgcgtgcgcatacgtggttcgtcgcgtgggaaggcgagaccgtcttcgggttcatgcccgtggagatcaccgacggcggagtggccaagatcaacaactactacgtttcgggcgacgatccgcagctgctgtcgcgcttcctgcgcgaaatcatccgatactaccaccgcgactatacgatacgttccgtgacgctgctccgccacgccgaggtgttccgcaccgagggcttcgtccccacgaaggagtggacgcagtacgtgacgatgcaatacgggaaaaaacggcagccatgaacgtctacgagcggacacagcggcggttgaaaacggtcttcgaccttttcgacaacatctacgtctccttctccggcggcaaggacagcggcgtgctactcaacctttgcatcgactacgtccggcggcacggactacagcgccggattggggtcttccatatggattacgaaatccagtaccgcgatacgctcgactatgtggaccgcatgctggccgagaacaccgatatcctcgatgtataccggatctgcgtgccgttcaaggtccagacctgcacctcgatgttccggcaatactggcggccgtgggaggagtcgaagcgggacatctgggtgcgggagatgcctgagggatgccttacgcatctagatttcccgttcttcaccgacgaaatgtgggattacgaattccagaaccgcttcgccgaatggctccacgcacgcagcggtgcggcgcgcacgtgctgtctgatcggcatccgcacgcaggagagcttcaaccgctggcgcacgatttacagcgaccgcaaccaccatcggttcgccggaaaacggtggatacgccagtgggccggcggcggcatctgcaacgcctatccgctctacgactggctgacgaccgacatctggacggcgaacggtcgtttcggctggccctacaaccggctgtacgacctcttctaccgggccggcgtgccgctcgacagtcagcgcgtggccagtccgttcatctcgccggccatcgccagcctgcacctctacaaagccatcgatccggatacgtggggacgcatggtcggccgggtcgacggggccaatttcgcggcgctgtacggcaggacggcggcagccggatggcagtcggcgcgcctgccgaaaggaatgacatgggagcgctacatgcacttcctgctctcgacccttccggagccgacgcggcgcaactatctggaaaaactatccgtaagcatccgcttctggcgcgaaaagggcggatgtctctccgaggaaaccatcgccaaactgcaaaaggccggcatccgcatcgaagtaggcgacaaaagcgcctaccgcaccgacaagcgtccggtgcgcatggagtatctcgacgacacggacctgccggaattcagccagctgcccacgttcaaacgcatctgcatctgcatcctgaaaaacgaccacgcctgcaaatacatgggtttttcgcccaacaaaagcgaaacgcagcgccgcaggaaaatcatggaaaaatatgaatcgctattacgaacatccgaccgagaagaacttccggagccctgtctataacgtccgcgccgtaccggtggagaagatcgtggcgaacagctacaaccccaatgtcgtggcgccgcccgaaatgaaactgctggaactgtcgatctgggaagacggctacacgatgccgtgcgtctgctattacgacgccgaaagggactgttacgaactggtggacggctaccaccgctatctggtgctcaaaacctcgaagcgcatctacgaacgcgaacgggggctgctgcccgtcaccgtgatcgaaaaggacctttcgaaccgcatggcctcgaccatccgccacaaccgggcgcggggaacgcacaacgtcgagctgatgagcgagatcgtcgccgaactgacccgcgcgcggatgtccgaccagtggatcatgcgtcatatcggcatggaccgcgacgagttgctgcgattgaaacagatcacgggcctcgccgaactcttctccgacaaggagttcagcctcggcgatgccgacgaggacacggtcgaatttgtgctataactgcccgcttattccggaatcgcgatccgctccacaggctgatcccgtttcgggtccagcggatgggactgataggacgttttcccgaagtcgatccatgcaatgatccggccgtcgtaaggggcaccagcgccagcggacggtattcgcgctgcccaagctcacgatctccgatgacaaggtacttttagtggaaatcaccgagaaaaacggagcccggcatcagactaccgaaataacgagccgcgtcacctcaccacgacgggagatttctctcccaaacagattatcaggtatttcaataacttttcggcatttatccggcaggccagttcctctttgagtatacatttaaaagccgagtcgaacgcatcccaaagcatcaaactgaagcggtcggcttcgacagggctcatgtacttggcctccatggtcggaagccacatcgaaaattcgacgttgaccgattgccggaacaattccagcagttcgtcggattcgtggcggtagtcgagaaacgtgttttcgcaaatcccgaacttaggccggatgaccgtttcatagattttcgcatgggttctgcgatggttatgcttctcgaaaaaccagcggtcgatctttttgacgcttaccacacgataaaggcgatatggattctcgttatccttttcaaaaccgttcataaaatccatcattttgagattaggaaaatttgttcgtattcagacgatgccggaacggcgatccgtgcgcacgagtcttcgcgggccggctttgcgggcagccgggcgaaagcggacggtgccatcagaatgaagacgaatcggaggcggtcgatacggaaccgacggcggttccgatgcctttatcgaaaaacggggaatccgcaggcaatccgaagcaatccggtgaaacaaataagtttcaccgacagcggagttttcgaataaaagttgtaatttggagcttgtttctaaactgtaaatcagcctttcgctttcacattcgggtcgattcatagtggcacatcttttgattcgcaatgtcaaaaaatatgcgcggttctcgaccggttgcttcgtaccgtcccaaaggttatggcgaaccagtcaagaccgcgcattacgatcttgcctgtttattcgccattgaggtaaaagttgggacttacgaacgataaacagtttacaacagataaattgctctattgttatcccgaatatagtcatttcttcgttatcatccaaattttttccggcgtttttgtgagaaaatcgatttccaaaacgcgaaatccgctgcactacgcagtaagtacccggcaaaaccgaccgccgtaaattcttcgttaaacgcgcatcgagacgcacctgttataataaaaaattggaatggttccacatgttcttgcaagggcccgacgtttcatccatctttgccgcacaaattataaaacagcccaaacgaatgacggtgaaacaatgtaatttcaaagtcggagaggtatatcttttccataccgacgatccccgatgtccggatgcggaatccctatggggtctttacgacaggcacgacgggaactcgatctttctggagtcgtggtcgacggaccagaaacatttttcgaaaggccggcatctacctgagcaataccggttctgccgcctctcgacccgcagtgaattacgtgattacatggtcaacagcatttactcggaaataaagggcctttcctgaaatgagcagggacaattataatccgtaccggatagtcggcgccaaaaagatcgacgtatggttttatgaagaaggcgatatgcgcagaacgcaccgcatcgtctacgagctgatcgtcctgccgctgtacggagtctgcgagaacagttttctggattacaggcaccactccgacgaactgctcgaactcttcatccagccgccctatatcgaagttccgctgtggctgatggtgatgacggtcaagaaaatgccggttcacgaagccaaccgtttcttcgagctcctacggacgaagatggaccgcatattcaggaaaaggtcctaccctctgacggccgagcagctcctcagactgctcgtcgatgcactggcagagttcatatattagaagagtgacgcgactcattgccggaggggaggccgttatcggcctcctctctttttgtatgatgtcatgcagctttgcgttcagagtccgagcgtctgcatttccgcgaccggctctataattccttcgtcgtaagggtctccgtagttgaacttcggccgcacgggccatgctgtcatctccttttcggggtatacggtcagcagggccgcgacggcctcctcggatgcgatggacgggtcgagccagcgcttctcctgctcttgggttagtatcttcggcatccggaacggattgcctccgccgttatggatcttccgcatcatggcgttcgcttcggtcgttatcagcacgaacgacagcactttttctccggtctgcggatgcgtccactcgtcccagagcccggcgatggagaataattcctgatcctttaaagtggtatagtaatactgcgcctttccgttcggcagtctgtgcggctcgtagaatccggttacggggatgatgcaccggttatgctgccacagcattcgccacggccatttctcgaaaagcgtctcggcccgtgcgttcttgaacagattctcccggtcgtaacgctgagcatctccgggcttcgccgtccgcggaatcagcccccactgcatgacctgaagttcctccgagcccgaaacgataacgcagtgcggctcggcataggcgggaatgacgtagatctcctcggccagccgaacgtcgtaaacgctcatcctatgttcggatccggcgtcctgacgggcccttgcgtcctgttcctgctcggcgagtacctgccgggcagcttcgataatatccaactgcttaccgtaccttttggctacggccgctgcatttgctgacagagaggtgaaaaaacacataaacaaaaattctttacaaagttagatggcaatatctatccgatcgctccatttggtcgtaggacatttcgagagcatctcgcgccgcagccgggtattattctgcccggtcaattccgcacccagcaccacgaggcggctgtcgaggttcagcggtccgttgacctcgtccaccgcggcctgcaaatgccgcagctgcccgatgtcgggcctatggtgaaacatgttgagctgaagcgcttcggcaggaataaggtccgacaacgtgacggtagcgcgtttgaacaggaacggccgttcgccgggggcgtaggccggccagatcgcccggagcagcgtcatggcataaggcaccatctcgaacgtattgtccgtcggtacgggaaattcgatttgcagtccccggaaggtctgacgctggttctcgttgaaaggattggtttcgatgccgacatagatgcgccgggcataggaatgctggtcacggagcttatgggcggacgaacttaaatagcgcacaacggcggctttcacctcgttgaagtcggaggtcattttcccaaatgcccgcgatgtgcatatctcctgcttgtcgggcggcgccagttccagactgatacagggcgtcccgttcatctcgcgccagaggcggtcgccaacgacagtcatgttcctgcgcacccactcgcgcggcagcacggagaaatcgtaggccgtgcggacacccatcgccgtcaggcgcttctcatgccgccgaccgatgccccacacatcgcctatcgggagttttttcaacgcctccacacgcttctcctccgtatcgatgatatagagcccccgccgggcgtcgtccgtcttggcgagcttgttggcggccttggccagtactttggtcggggcgatgcccagacagatcgggatgccgattccgcgccgggtggtgcggatgatctcgcgccccagcttctcgaaatcgaagccttccattcccgtaaagtcgaggaaggcctcgtcgatgctgtatatttcgaggttggggacgaaggaggcccaaatgctgtgcatgcggttgctcatgtcgccgtagagctcgtagttcgaggagaacgtaacgatgccgtgttcccggatggtgtctgctatctgaaacagcgcgtcacccatcctgacgtatcgcttcgccggccggttcatggctatcgcacagccgtcgttgttcgaggccacgataatgggctttccgtgcagccacggctgcatggactcctcgcaggagcagtaaaatgaattcccgtcggcaaggccgaccatctggcggggattcaggggcaacagcttccggctcatcctatacctcctttcttcgtcctcagctgccggatggagtgggtgacgatgccccatatcaaccgttcgttctcgccggtaatccgaatcggagcatagtccttgttgccgggcatcagccagatctccccgtcgtcgtgcacctcgacgtatttcatggtgaagccttcggaggtgacgcatacggcaagatcgccccaccggggttcgagcatccggtccacgatcaccgaatcgctgtcctcgatgtcgtcttcgatcagagagatgccccgcactttcccgaagaaggtgctgatcgggttaggaatcagctcttcgttcaggtcgacgagccccgcgacgggaacgtcgctcgccggaaaatacgaggctcggatagcccgccgctcgaacagcgcgggttgttccttctgcggcaggcggtcgataaggcgtgtgcgccgtcgcttgaacctccggactttgatgacgaccgtaacgacgcccagcacccgcgcttcggtgtcgccgtcgacaggaagcgtgtcgtccgttccgccgccgagaagccatagctctcgcccccgtttgcggatatatttcagcacccgttcgccgcagacctcgcaaaacgccaggtccccggtgcgcggtgcaagccgcgtgtcgaaaaggatgccgtcgccctgctccagctcctcctcgaccagatagtaatcccgaacgcgggcatagtatgtcgcacccggactcagtatgaggacttcgttcaggtcgatgcggtcgccgatatagtccgcggccggcgaagggaatcctgccggaatgccttcgctgacgtagggcagcgatttgacggtcgtcgttataagaccatatatatcgaaatgaatattcatcgtgcataattaggcgcaggggcatacggagtgtcggcacgcaatgcagtcgggcatcgtgtcgtcgtttcgacaaatagttaagcggggctttgccggctcctgccgaccgtgtagtgtgaaattgcgtcgtttcctcggtactccctgcggagttcgttcacaatacaaacgaaaatatcgtgcctttgttgcataagcgccagtaccggcattccgaaagatatataaaagatctaatcaaaaaaatgggtatcaaccgcgagtaatttcccggatattccttatatttataactctgcatatttcatagcgtcatgaaactgagtatagaatatctgccgaacaatcggatcgacgatgaagagctgaagcgaacacgaactattgcaacataatatttcccagtgtaatctcgtgatactatcgtttgagaaaatgagactacacgatagattgcataataaccactctattggttcctattttgatcccaaacattgacaatagcccgcattttttcattgtatttctgtgctcaattgttaatatttgctacctttgttcacaatataacttataagggcttatggacggcatggaggttaatttaagtcgggcgattgattttttttatccatcctcttcatcattggagcttgtgtattttgaagctattgccaacgcaatagatgcaggcgccaataatatccaaataagcattgccgttgattcgtattccaagccggaatctcttacaatagtaatttctgacaacggtgttggttttactaacgatcggtatcgtaaattcactaaattacttgaaacagaggaagaagatcacaaaggactcggacgattggtcttcctcaaatatttcaaagaagtttatatcgaaagcatatttgagaaacaaattcggaagtttacgttcaagaagaactttgagaaaaacaatttcactctctctccggctcctgatgccacttatacgggcagcagattggcatttagcgggtacctaaagaaaaaattatattcttatgattttcttaaaccggtatctattaggcagtctatactttatcatttttacccgcatctgttttccattgttaaagcgggtaaagatttgaagattgatttaacgttatctaccaaagagcctaatcctgagcaaggattttataacgattgtcaaatactgatagctagtcaaagtgtcgatttagaaagcagaaaatttcctgcagaaagcttagacctttttgacacgattgatattttttacaaaatcaaacaaaccaataaagaatcgtcactagtaaccgcaatctgcgttgatgggagaacaattcctattgatattatgtcaaaagaatctacccccaaaggatatgaaatagtttttctgttgtattccagtttctttacaggtaaaacaaatccttctcgagaagccctgacacttgatgagcaagaattgaaaactgtaaaaaatctatttaggaaacatgcaacgattattctgaatgaaaaaatcccaagcattcaagaggaaaataaacatataacagaaagcctaaataataattatcctcatttggcaggttatttcgatgaacaatcaattggaattatcgatcgcaataaagcgattgaaacagcccaacgtaagttctttcaggcacaaaaagaggttttggatgctccaaacacaatttcaaccgaacaatatgaaaaagctcttaacgtttcctctcgaacattgatggagtatattttatatcgaaatgtaatcatcaaaaatctaaaacaaattgataagaagaatccggaagcggatattcacgatataattgttcctagaaaaaaagtttgtgggaaagcaggatttataaacgatctatacactaacaatgcgtggttgttagacgataaatatatgtcttattcaaccatcctcagcgatttggaaatgaataagcttatgccatatcttgcattggatggagagaatgttgatgatgaaaaaaggcctgatattgcaatcgtcttttctaatgattttcataatccagtaggccaagtagaagtacagactaaaacggatgttgttatcgttgaactcaaaaaattaggattgcctttggccaaaagagaagaggtcgtcagtcagctaaaacagcgcgctcgaaaacttgcaaaatattatcccgataaaattcaacgtatttggttctacggaatcgtagatatagatgcagaatttcgcatagcgttaaaagaagaaaattatacggaattattttctgcaggatctttattctacaaagagcatacggttattttagacgaagataagaatattcgcattccatttggcttatatgtattatcctttgatgcctttttgaaagatgcagaatctcgaaattcgacatttctcaatgtgttgaaacaagggtttttaaaaggttgcaatatacctaaagcatcgaacgaacaaaagtaacatactttcgggacgcagtgcgtcccgtcttcaaaagcattaaatatgagcgctataacaactctatacgacgatattcgagctatcattatcaatactcgtaacactatatacaaggcggtaaataccggtatacttgaggccaattggaaaataggccgccgaatagttgaagaagaacaagccggagccagtcgcgcagaatacggacaaagggtaattaacgaccttgcagagaagttgtcggtagagttcgggcgaggtttcgacgcccgtgaattacgccgttatcgtcagttttatttgctgttcccaaaatgggacgcactgcgtcccgaattgacatggacccattaccgcacgttaatccgtgttgaaaacgaacgcgcccgactttactacatgaatgaagctgcattgcagaactggagtacgcgggcattggattcgcaaattgagcgactgacctacgaacgaattctctcttcgcaaaatcaacttatagtaaaagaagccgaagatgcggcttcgcgccaagcacaactcacaccggccgacatcatcaaagacccgtatgtgctcgactttctcggtcttccgagtggcgtgaacttctatgaaaaagatttggaaaaagcgcttatcgacaacctgcaacaattcttgttggagttggggcgcggtttttcctttgtttcacgtcaataccgtttcaagaccgacaacgaaaactactatgtcgatcttgtattctataacttcatcctcaaatgctttgtgctgattgatctgaaagtcgggaaactgacttatcaagacatcggacaaatggatttctatactcgctatttcgaggagaatatacgcacagaaaccgataatccaactatcggtatcgtgctttgcaccgagcgggacaacacgattgtcaaatactcggtaatgaacgacagcaatcaattgtttgcctcaaaatacaaactttatctcccgacagaagaggaacttattaacgagctggaaacaagtcggaagcagatagaaaataatgtcaaataacgtcatcccggcgtcatacgcaaagaacctatcgggataaataacttgaaatagcatgtgacaatgcgtcatagaaaaatgtctgcggactgacttttgaaaaatataatttccaagaacaatccataacaaggctatgaccatatagaagagttggtttttaagtcacaaattgcagtcctcgccgaacaatgccaatttggagttttcggcaattcgcatgcgtatgacgattaacagggcgcagtgtttactacgacctttaagatcaagcctgcattttgggacgtaggcaggagtgctattgaggatccgaaccacatccggcacctaaaggcaatcttcaattgcatgttgccttacacaacatcaatgaagagttcaacaaagccttgaatgcctagcttcgcatgttgaaaaattaccggttacgagatatgcgtccaacctccgatttcataaagaataaaaatacgtaaagaattgaatcgggacgaggtaaagaccaaatacatatttaacgatttccttacattcatagaataatatatctctttgcagagaaagaatgattgtcaatgcgaaagaggcaaaactcgtcccgggaacaattcgcaacgacattgtaagtatccacctattgctccgactacctatccgccgtatagttccaaatgtcggaaaggtcttcgaccgctttgcgggtaaaccgtatttcatccattcgtccacttggctttcagggttttcagatgatcctccgggtcgaatccttcggccacgccgctgtcgattccctcgcggatggcaactttcaactccgtcagacggctttcgttctcctccaaaagccgcaagccggcccgaataacctcgctggcattgttataacgcccctgtgcgatttttgccttgatgaaatcctcgaaataaacaccgagggctaccgatgtcgttttcatagttgttcagtctttacgcaaaattaccaatatttaataataaaaacaaaatcccgaccggatttattgtgtccggccgggatcgacaattcgtattcaacttttcaggtatgggtcatccagccatgaaacggcccgtcgataaaacaatgcgaccgatccgggcagccatgatagaccagtccgccgacaacgcccaaacgcccatcgggataacgctccttgaaaaggaacgaataaggtgcgaagtccttgtaaagttcgatctcgcacagatgatggggattttgctcccggcgttcgagccgtttcagacactcgtggagcgtcttgtcgtcgatactttcggcatattgcactactttatcgtagtgctcctgacacatgattttcataatagtccggattttcgttagtctatatcgcagccgatgaaggtatgctcgttgataagcaggtagtaataaccgttaccgcatcctcggtactctttcgaaaatcctgcggtcaggtccccaacccggtgatagccatcgtccttatcgcaaggctccacccatagcgaaccgtcgtagccgcggaaatcaaaccgacccgaatggaacggcgtgcggtttttgacggcctcgcagaaagaccggtaagtcgttttgccgcaccatttgcgcacggcttcgagcgtgatgatctgcccgtcgatactggttccggtcgtgatgccgtttttgtagagatccttgctgtaatcggcatgctggattttgcggataaacgggcttgtgaatcctgctttggccgcttcccgctggaatttgcggattagacggcgattgatttcctcagggtctttgtccggagccggtttgaaaatcttttcaatgttgtcccagtcgccgaatccgaagccatatcttcgtctgccgataccgatgatgccgcaaatgttttgatcgcggttgtaaaacagacgtcggcgtcgaccttgatactggatgtacagagagtacggggtttctggattgcgtaaatattgttctgcttcgtgcatggtaaatggatattatattaatacattgtatcgcgcagccttggatgcacagggacctgaacactggctcgctcacagaggtctatgattcggcaagtctgtgtgtccacatcatccaaatcgagtggcatacggatgacaggatcattctacactgtaactttgcttgtagggcatgactcttcgtagattaactcttcgagcgtcatgtcctgcggttgactgatgtcgtcttccggtctgacgaaatagcagaccgcagtatgccgcccgtggtccttgacgagtttcacgggttggagcgtgttgtagatgcgccgctctgtaacgggaacgtcgagcgccttccactccgtccggggcagggcgacctgctcgtcccggtagccccagacgatgaccgacttcggattgggagccgcgaataccgttccttcgcaatcggagagaaaccgtcggaactcctcctccgtccggaacgaaatacagtcgccgcggtaaaggttaccatgcaggttctccgtatctttgtaaaggctgatcttgcgccatttctcggtggagaaatcaccgtagagcggatcgccttcccggaattcccacagcggcacctcggcgcagaaccggacgactccgttgccgcaggcgccgcaatggccccaagcacagaaatcccccggcatagcaccggaaggcttcagttcttgcggcatcacggctgtaaaaggccctccgctgaccgagcagccgataccgtcggctgtcgcccacacgaaaggcacgtaagggcacaggcagatcgagcgcattccgtcttcacggaccgcctcgatcaaggcgttgccatggaagtcgccgtggcgcgtggtatagcgcacccggtcgccgacctgcgggacaagcgggttgcgggtacgttcgatatgacgcaccaaagcattggcggcatctacgtcctcttgcgtcaggcaatgttcatggtcgtaaagcgtattcatcggcagcagtgtttcgcggctgtaccgatcttcggttttatcttgttgcatattgctgataataaaaacgccgcgacctttcggccgcagcgcagattaaacgatttgtttatcaaggtttaggcagcttcggacggaatcgcatccggggtttccggctcctgctctacagccagccgttcggaaatcatgcgtgccgaccggttcacgtccgtgaggatgtcgaacaggtaggtcggctctttatggaactccgccagccagtccttgatataggcagcgctctcctcgcggggcgtcgtggcgaagcccagcatcgcgccgcacagggccgccgtaagttcggcgaccagttcctcccggatataatcggcatcgccatagcaagcgccaaaaggacggttcagacgctccgcatgccccgtactgtgcgtgacttcgtggagaagtgtcgtgtagaatgccgcgccctccgggaactgccgtttttcggggcagacgatccggtcgagcgtcggtgaataggacgccctgttgccggatttgagcaggatgggacagagccacgactgctccgccagcatccggtcgagcacctcgcatgtcagaccgtccgagtagtctttcggcccggtcggtgtcgtaagcgaagcgtagcgctccggctgctgttccgacatatccgtctggtcgatgttgaagaccgggtaatagcgcatcacgggcagcacgtcgtattgccgccgctgctcctgcggcaggcggtaatagtccgccaactcaatcttcttgcgggtctccttatggcggatatacagtttccagaagaagaccggaaacgaaccggagcctttgaggatgttcaggccctcctccttggcctgcttgaaggtcataaagagcggcgtactgtagcctgcgatctccgagaggaacagcagcatcaggatattcccgccccggtagggcgtgccgcgcaggttgcgcggaagaccgtgcgcaaggtcggcgatccacggcttgcgccacgcttcggtaagcgtttccattttctttatcatcagctccgtcagctgcggagcgatcttttcaatcagattcttattcatggctcttctctttaagttattcttcctccggagcggtagcttgccgccagagacggatcttctcgccgttcgtcctgccgttccaccacatgtcgcaggcatcgcggaaagccttgcgatcatccttcgggctgaaattttccggattcagtccggtgataatttcccggtcttcttctgtcgttccgtcattccaccacggctcgaccgtatcggacatcaattcgctctcgcgtacctgacgggtgtgttctgcacagtcgtcgcaccataagtcatctttgtcttccgccatagactgtacttcgtacgtgttgctgtccacccagacttggcaggatacccgcagcgaaccgcacgccccgcagcgccacggatcggcgggcatctctactgtcggtttttctgcaataggtgtctgttccggaatctctgaaatcttattcataacagtagtaatgcaaagacggagcaggcataacctgctccgtcggtttggacatttagttcatgttgttactatgccgccgttttcatctcctcaggcatccggatatcgggttcgatatccgggtccataggaataatcagcggctccggggtgggttctatagcgggcgtctcgtccggcagcagctcgggcatctccggttcggcatccggtgcctcctgcatcgaaaccgccatctcctcggcctcggcttttgcctgcaaggcgtcgatctgttcctgaagacgggctttgcgacgctcgtagactttcagatactcctgctgcaccttctggctctgctccgagaagttcatatccgcgaagcggcacatcattcccgtcagaagcgtttcgtccgtacagcggtactccggagccgccgagcggaagtagtccaccagataagcgcgaaccagcgccgcctgttgcttggccgtgatacgacccgccgcagcgaactgctcccggtcggtcaggcaagagccctccttaggccggaaaccgcactggcggagtttcgagtcgctcattacgcgctgcatcacggcgtagtagaacatctgctgctcctctttctgcaagggcttgttcgcaactttcacatcgaggaagacacgcttcatatcggtcgtgatatgctcgtagcagatttcccggtaacgacgctcctgttgcaacagcccctccagcggcgaaggcggaacgacggtgacgaagaccttatgctcatcgtcctgcccctcgtttaccgtcatttcccgctcctcatcctcgatctcttcgtagcggaactcgatatcgaggttaccgatgacggcgtacttgcgcacgcgcccttccgagatgtcgaactccaactgctgtgtctcttcggcgaatgccgccatttcggcttcgtactcctcctgagcctcggagaactcctcttccgattcgaactcttcggcctgcggagcgtcgggcatctgagggcctttatcgtagtgataaacgctgtattccagctcttcgacgtgatagccttctttctcaagagcttcgagtactgcggcaggcgtttcgccgtctgtggccagtgtcgtacgcggatcgtccttgaggagtttcacggccttctgtaccaaaaactcgttgttcttgcggatcatgcactcgcggttttgacagcccgcgcaaccgcccgtacattcgtccttgaacaacacctgattggccgtattgtgctggcaggaaaggcacttcgtcttatcgaagttgtagctttccagcttggtcatataacgctcgtagagccgccgggcgatctccttgatccgcgccgtcttccaagagctgtaacacccctcggcgaaatgatcgttgtaaacctcctgctggatgtcggcgggatatttggcgatctctgtagcgacgcccaccgaaatctcctctttgtcgagcatcccggccaaggcgtcgatcaattcgcaaagtttcagacgcgagcggatgtaggcctccgacttgccgaatttgcccacgaggctctcgatcgtatgccgccccgactgcaaggcccgcttgtaggcagcggcttcctcgcgcggccgcacgtcctcgcgttgcaggttctccgtgatggcggcatcctcggcctcggcgtccgacaactcccggataagggccgggatgaatttcaggcccgccattgcagccgcccaatagcggcgctcgccgtagacgatctcgaagccctcgtccctcggacgcacgcagataggttgaagaacgcccgactgtttgatgctctcggcaagttccagcagcgtatcctcgcggaaattcttgcggggattgtaggtcgaattgacgatcttgttcagatccagcagccggacatccgtctcgggatgggctgccggttgttcggcaggactggtttctgcgacaggattcacagctccgatatccgttgcctgcggttcggcgggtttcatgtcgggactcccggctgcaaccgggtcttgcgcttgcgccgcaacggcctcggaaacggccggcgtccgaactgcggtcttgccgcccttcttcgatttcgaatttgcttttgcagtctgcataacatgtaacagtttttaccgtgtgtctcacgtgtttatccgctcgcacgaattttattgtttttatcgcgcaagcaatgaataatatgttatgaggctttatatcccgaacggatcggttgcctcgggaagattcataagcccgcggcgcaggtgcaggggcggaaaaataccgcagccccggcgaggatgatttttccgtcccggagccggagagggaggcccggccgaccggcccgggattatctttcccggggcaaccggcaggataggtaatttccatttatctttgccgtgacaaacatcggaagcagcagcttcgatgtcatattgaaacccgtcatttctgggtataatcggatcgaagcatccggcaatatcctgcattcggtcggattcatcttcgtttccggtatatatctccggaaaatttgccggttccatacgaacagttaattttgtaatagattcagtttatcggaatgcgtaaatcggtattcatactgctaacggttttcatggcctgcctgctctgcaaggagtcggagaatatgccgggcacctctcggaaattcatggatgaaacattcctaaaccgtggggaggagaatttacttgccaggcaatggcaatgtgaatatatctattccgatttaagtttcaccagtgtcttgccggaggccaaaaagacacgctcgaccgtatccatgttccggcacggagcccatgggcgcttgcgtgccacggttttatcaatgtgttgcgtcacatacgggatttcgggcgtcgcaggactcgcagcaagggtacacggaaaaggtttcgtggccggcctacatgccgtagactattacgtctatcgcctgcaccggctcattatttagccatatggcaagaagactcgcaaaggccgggtaaaaacatggaatgtccggaaaacgggaaagttgtatgtcctgttttcgggggaataaaatgcccggctgtctcgcgctcgaaattcgttttttatacgtgtcgccccgatgcatatacgataaatatcgctccggacggctctgttctttcggagaatcctaaagatggaaatttacgatgtaccgatatgctgacgcgttccgttgttcacgacggaattttttatgttttgaagagagctgtcgtgatctcacacaacggcctgtacgggtagatgaaaagtgtctttggagggagttttcggtattcccatatgacggtataaacactccggacaccgtttcccaacagtatccggagctgacaaaattgtgcttgcggtattttgcacaggataaaaatacggattcttttcgaaagcagcaagccgtgccccggtttttcagcttccggcggttcatcctcgagaatttgcgtttcttatatcgccgcccgttttagcaatttttcccgcgggccgatattcggtttgtatattttaatagaccgaaaataattattttggagtcctgaaaaacataatctccgtaagctgtatggtagaattggataaaagccaaaagaaaattgcccgaacactcataagccgggccttggagcgtgaatgctgtacctttctggcgaaactcaaacgactcctgcaggatgaaaaagcgcagtcctgccatgagaaatatttggaaatatataagagcatacagacattcgacaaagatataagtcgtcagtatgacggtctgaacggctcccgctatgctttgacggtattcagccttttctataacggaatccttacggagaaggatctctcggaattcgacgacagaacccgggaagcgttcttggagcacagacggcagtggaatctggagttgtaagccggcagcacggacatataccgcatatgaacccggcatgcagaacccgaaggagcctcgcagaaaaattctttcgggaatggaatgccgtgcaccgagggaaccggccgaaaaaaatagcatcacaaagctgtttttgtgaaaaaatatctatttttggatcgtgttaaactactaaattccatacgaccatgaatgaactggtaaagactatcgacgagctgtatgcggcattcaagaccgacgcagagcttcaggcgggaaaaaacaacaaagctgcgggactgcgcgcccgtaaggtgtcgctggagcttgagaagaaactcaaggaattccggaaaacgtcgcttgcggcagctgccaaatagctcgttttcatcgcatgacgcagggtgttctttcgaaggacacccttttttgtcccggcggtttcggccttaccggcggaggaaatgacggcagccctgtcgaagattcagccccggagtttcccgtcggtcgtcagggagggattcaaccgctcccgaaggctcgtattgcgtttcagcacggacacgttgcggacggcataagccaaggctttcgtcgcaccgatcagcacgcagatctttttggcgcgcgtgatacccgtatagatcaggttgcgctggagcatcacgaagtgggtcatcagcaccggcatgactacaatcgggtattccgacccttgggccttgtggatcgtcgtggcgtaggccagcgtcagttcgtcgagttccgtgacatcgtactcgacccatttgccgtcgaaatcgactttcaacgtcctctcctccgtatccacctcccggatataacccagatcgccgttgaacacatccttgtcgtagttgttgcgctgctgcatcacacgatcgccctgacgataggtatagccgccgcgattgaggctcgggtccgaaggattcagtgcctgctgcaacagcaggttcaggttcgcggcgcccacgacacggctgtcattgtcgaaatatcgcacggccagtgccgccatctggcaggccgtgcggtcgggtgtcaggtattgcgaagcatagacgcccttgcggcgctgccgctcgcacattgcatcatacggccagttatcgccgccgtagaggaatggcaggtcattgtgctgctgccaataatcgagaatctccggcagcgtatccggccaatagaaattgcgccgcagatagtaattctgaagcgcatagcgttttgtgattctttcaaagattttcattggatcaggttttagggttactcttttttctgccgcggcaccgcaatccagtcgggattcagcgtcatacgccaatcgggatcgccattgcggtaagcgaggagctgggcggcgtaatcgtgagcttcacgggaattttgggcccgatagtgaaacagccatttctgaccgcaccggggacattcccagacgaccatcgtaccggcagaggtctcggcaaggcccagcatgcaaggtactacgtatagtgcggcggttcgaaatcacattcataacaggtataaataccgcggttatagcgtccctgcggcggaacgcgcagggacaaaggaatatcgatcataataagttatggtttaagtgttcgtatcttcaggcgaagccgcgactccatcctcttggcaatagtcgaagcgcatcagctttgatacacgggcatactcctcgtcgtaatatttgtcgtattccttttgaaactcctccttgtaatgggttccgctgtcgggatcgtcagggtcatcggcttcgacaaatgtttcgaaaggtgcatcgtgcgcattcagcagttgtccgacggccagatcgcaggcaatttccataatcgatgcgttgatcgcgtccttatggttacggtaatattcgtttaaattcatgttttagttgattataatgttcttggtttgagttattccggtcgatatcggaaggttgtccgtgatacgggttccgtctgcggctgagtaaatcataaccgtaggatctccgttattgttttctatgtccagtggatattccgttccgggaatttgataagcagcatcttcctgataggtcggatcgtttgacagttcgtcgagttgaccgtctgcacacagctccttgatcttctggactgccgtttcgagattctcggcttcaaaactgaaataccggcaatctatgacagtaattttttgattccgataaaattcatagcgtttcattgcgcgattatttgaggttaatacttcgatacttccagtccttttttcgtcatgctcatcgagaagcccgcctcatggagctgtttcagtaccgaagcgttgctctcatggataagaagcggatagacttgggagtagttatcggcaatcggtgtgttgaacgacaccgtgattcggttgttccgggtgatgatttccagcgcatgccggaaatcggattcctgcatgttcatttgaaggtgtctttaatgattatcggatatgggacgtagttcgcatggatagacttcagtttccgagtctgagcagcagatcaggataagatccttgtcggagggtgtctccttatcgtcattacccgaacagacgacacaacaaccggacatttcatagtcgggatcgctccggaagacacgctgcccggggtgaaagacctgcacgcgcggcagcttctccccgtcaagggtctccggaagagcgattacttcccggattgcaagccggggatgtttgtcgaaatgccagtctacctcggattcttcgccgagagtcgttcggatcgtgttcagaaccgttccgcattgttcggaaacaagacgtgcggcttccttgccggaagccgcacgcagggtaaaagccccgtggaaggtataacagaccttcagtttgaattttcgtcgcataatgtttaagagttattgttttcagaccattcgtcgactgtcgtcgcgtcatagatgccgtaccggcgtatttcagcggacgcctgtccttcccggagcaggggctgccgggagacgaacgttccggtgaagtttgccaaagccagcggaacgagccactgaaaatcgctgccacggccgcccataacctcgcacgagtgaaaatcggcgggaagggtttcggaatcgagccgagatatggtgaaaagagccgggatgccgttgatctcagcgtcgcggaaatccctgatatccgcgaaaggaatggatgattcgtatgccatgatatggaaatgacgccgcccgctcgttgcggagcaggcggcaggttattaaagaaagattcggtaccacgctccgagcaggtagacgttaccttccacatagagcgagtataagtccgtagagacaatccgcaggaacagagtcctgtcgccgtgcagtttcccgatctgacgccggaacgcctcggcgggaaagggcttgtgcgagatgaagcgtccgcggatctctgcctccgaggggatgtattcatacaaacggtaattgagcgccagccagcgaaggattttgcggcgggttttcgcatcgtccgtccgcagggtgaagcggttgaaacaaaggttgttcatcgtaaatcggagttaagtcagcgacaaggcccgacagaaatagtccgtataatcgaagtccagtcccagccccgagcaggctgtttcaaggtcgccgtagcacagcgcgccggcatcccgcaattcccgcaggttacgaagttccgcggccagatattcctcggcacgccgttcgccgcagtggcatgcggtgcagatattttcgataatgatgtttcgttccatggatcatcttcatttcaggttatacaatcgaaaaagtttgcgccagcctcttccggccacaatccgttcgacctccggtgccagagagtcgatgaaatcctgcaccctccagccttcccggatatgtttttgcaagtcggtcgctttcgtcgtatccatggtagtagtcgatcagggtttaagtatgagtttgttatcggaggcagccagaaaatcatcgagcgtacggcagcgataatccaaagagatcttttcgctgtaatccgtctgccggatttcgaaagtataggtcaggccgttacgaatgatctggccgtgacttttgtcatgaacccaaaccacatcggacagagcctccaaccggttgcggtacccggtcattttgcgttcgttctccgcatcgatccgttcgagattccggaaaccctgcgtgaggtattccacccagtcgtcgatcttctttttggtgaagaccccgatacggttcggagcggtttgtttgtcgaaagccttgccgtaggagtagttgtccgcatatcggaagaacgaccaatcgaatcggaggtcgtaatagggttttggatagaaatattggcggacgagaaacaggatgtcgtttcttcggaaaccggtgcaagcttcctcgaaatagtttttcaggctgtccacggcatgtgtaacacggtagaacaaggctgcctccggaacgaactcctgcactgtttccaatacggccgatgcgcttcgaatagcccgctctatgttatcctcggcattggcgagcagcagctcgtcgaaggtcgactgatcgatccactttctcatcgctgagcaacctgcctgcggcaggattccgtttcccgcaggtaatcgttcaacgcaggcacaaggatcgtacactcggcatcgggctttccgagaaaacatttcacctttaccgatgcctccacgccgtcccgggcgtaggtcttgaagcggtagtcgtaacccgccaccgcaatctcgaatttttgatgtttcatcttcgaaatggattttgatttgacatacggccggcagatccccgctatgaaagtgagaagccggcttcggggcgggattatcagcgacggcacggacaaggcaaatttttgaggggcgatacaacccgaagggtggagatcgtgcgaaaaagccgaaaagggcgtaagcccctgacgctatcttgccccgcagacggcgttcacaaagggatttttaattattattcgcgctggctcaaaacaaaaagagactgctgcggatgcagtcagtccctttcggtcagcgcactgtgaactgtggtatccgggagagggtcttccgcaacttccggcggtagaagtgttccgtaagcgcgatcagctcgtaggcagcgtagagcatctgtccgttgacggcacgggcgcggatcatccgctttttacggcattgttcgagctggtggcgatccatacccagcacctcgcagaccttgcgggccgagaggaacatcgggcggtcactgtggctcaacaggtgttcgaagagcagcgtggattgtgtcagcatgaaatgcgtgcggagcagtttctcaaaatacatgggctccaccagataataagatctttctgttgtttcagacatagtattatgtgttaaagattatgaatagcttttctcaaagactttttctgcttatgttccagttcaacacgctctatgaagcggttgatttcagccgtcgaaaacattagacgacgaccgaaatggaaaccgacgagctgacccgaagtgcgataacggcgcagttgacgatcgctcatcttcaacaggtcgcatacttcgtcgacttccagaataggcatcccgcaaagcatattacggtggtgtttcataaaggagacatcctcgcggatttctcgcacgatttccagaatttcttccatgcggtccatagcagtaactatcacgaatgattctgacgcaaagatgccacaaaggcacgggtaattaacacacgtaaataattacatatcaacattttaacaccatggcttgattttcagaaaggtcttatcgggcttgataaagatgatatttggaaatatgaaaaattaatcgtatctttgtctatgtagtataggtgtgcattgaggcgttaaacattcactactaaatagtgacctcaaaagcgaacttgcattataagagattgatatacaacaaataaggaataagggttcgagccccatcttccacccgtagaagcagttgaaaatcactgcaacaaagtgcaaaaacctcatatatcgttgatatatgaggttttttcgttttaccgcacccctcctactcttctcacatttctcccaagccatcgaaacccggcagccaatgactgccgatgtctattccctccgccccggcatccgctctcagcaccaccagccgctgcagccgccgcaccggacggacggcaaaaaaatggggagggacctttatcaggcccctccctccgcagtaagttgcgtcactgctctcgcatcagcgaggattcttttcactgcatgcaggtagacacaggcagccgatcgggtgaaactgccggatggtttcaccccggatattccgattgcttcatgacggcgcgtcttttgaaatcgctcctcaaaaaaagatgcgcggaacctgactctggcaatagtagaataatccccattattcaaatatgtaactggtcaggaaccgcgcatatcgcgtcctgactgttcatcagtcacattcgaatggggattattttgccagaataaacagccgagctgtatttcctatcccaaatatagaaaaattaatcgttttcatcaaaaaatttatacaatatttagtattttttattttaatcggactctgcgcgcactaatccccgacatacatgtcgaagatttcatgccggtcgaaatcgagccagtaccgcagcgccagcgctctcacgtactgccagtaaggttctgtcaggtcgccgtatagttcgatcccccgcttcacatccctgcggatacggtcggcataccggggtttcaggaccaaccgtatcgtcttgtccttgaaggtgaaacgcgcttcgggccgcggcgtgtcgatttccgcaacggtaatcagcccatgtccgacggaggcccccgttccgacctgcaggccgtcgttcatacagctcacgggcggtttatggcctgcataagtcgtgacgagaatgtcgtccacgccgatattgaaatactcgcgggcacggattcccattttgacgccgatcgtggcgtaaatccccagatggccgtgcagttcgttggtcagcacgcccgcccgccattcgctcaatccgtgacgggcaaccgccgagtcgatgatcggaacgacatccgccgcatagagtgcgccgccgaccggaaagccgtaaaacacccggctttcgctgtcgggcttgccccggagaatcgccgtcagtcgtgtctgcgcctccgccgccgcgctcttgtccgacagttcgcacgcccgaaccgtcccattcagttcccggatggaaaacagctccggagcgaacagataaaccgcgaccagatcgtcccaagcttccagatgacgctccccgaccagttttgccagcggaggcgtacggtgtgttgcggcgatcttccgggcgtagacgttcggcacggccgccaccgaatcgatcagggcgggcgtaacgacgaccggacatgccgggtttgccgacacgacagttacgggcacgccgctcgccagcacataacgggcggcgacgctgtccgtttcgaaattggctccggagagcggttcggcccggctgttgtaccagacgatccggtcgatccggtcgccggaggcgggattttcccgcagaacgtcgtatagattcgtcaaagcaccgagggcgatgaaaacgaccttctcctcctcttctccgagggtttcggcgatcaatgccgacgccgcggggaagccggctccggaggttgcggttgcggcatcgccccagtctacggttccggaatgggcgcgccacgcaggcgcgggggcattcaccgcacgtcccgcaccgaccggaacgccttcgtggtagaaggaatcgagaagcgcacgcacacgtacggcggcgctgtcgggaagcagcgccccttccgaagtcgtgacggcgagcacctccacttcgcggttgcccagcagcatgcagagggtgcgcagatcgtcggcggcgccgtcggtgtcgacgacggcatggaaacgggctttgcccgaatgcgcatggcagggagcaaggaacgctgacagtatgaccgccaacaggccccggcagaaaaagcactgacgaattgtcatggtctcggatcgtattaaaaattaacattcataccgcccagcgccgttgctttcggcatgggaaacccgtcgttgatctcataacgctgcgccagcaggttctctccccgcacgaacagatcgagccaccgggtcgcgcggaaagtgacgctggcgttccacagcacgaaattatccttcgctacgggtttgaccgaagtgtaaagtccgtgaacatactgcacgcccgtcgatgccttccaacgtctgcgcgaaaaatcgaccccggcgtagagcttgtgttcgggagccgcaaccaccgggtaggccatatggaggtagctgtagttggccgagacagcccacacggggtttatgcggcaggccgcgtcgccctcgacgccccagttctcgatccggcccgtattgatgtttttcgggcgtccgtccaccgggacggtctggatcatgttgtcgccgtcgatatagtagacgctgactccgtacgaaagcgccccgcccgaaacgcgctgcgtgaacgaaagttcgtagttcatcagtttttcgggtttcagatcgggattctgcggcggaaacatatacatttcgcggatcgtcgggaaacggaatcctttgctgaccatcgccttgatctgggcgttgtgcggcagcaggaacgacagtccgccctgcggcacccactccgtacccgcatgcgaatggtgatcgaggcgcagtccggcatcgagcgtcagccagtgcgtcaggctctggcggaaatcgacatagccggccgcttcgtccatcgtcttgtcggccgtggttttatccggagccccgtcggtaaaggcgttccacgccttgccgccgaaatgctgccagtcgacgcccacggtcaggcggttgcccctgaaaagcgcgacgctctgataccacgatacgcccagcatcctgtcgcgggagttgaaacggtagttcagcggctcttcgccgggcgagtggccgtcgttgatcctatgtcgtccccagttgtagaagaagctcagggttccggaagtctttccgtagtcgttgcgcagcgtgaacgaagtcatgccgcgggtaatacgctgcctgttgtccagaatgggctccgaaacggagcccggattccgggcgttgaaatgcgtgaggttcacgtcggcgtagagatcccacgcttgggcaatccggtaacccagcttggcgtaaccgccgtactgctcgaagcccatgttcctgcgatgcccgtcggtgcggttgtaagagccagtcaccgtactcgtaaaacgtcctgcccgaacctgattcgtaacctcggtttcgagcgtattgtaggacccgtaaccggcatggaggtcggttttcaccccgtcctcgtgcatcctgcgcgtcacgatattgatgacaccacccatggcgttcgagccgtacagcaccgaagcggggccgcgcacgacctcgacccggtcggccagcatcgactggcaggcatcggcgatcggatgccccatcagccccatgtactggggatggccgtcgatcagcaccagcagacccgttgtgggacctccgccgacaccgcgcagcgtcatctgcccggcagccccgcccgaaacgccgtaccccatgatgccgcgtcccgtaacgaacagtcccggaatctgctcggtcagcgtcggcagcagcgacggctggaatccctcggcgatcttctgccgtccgacgacggaaatggtcatcggcagatgccggacgtcggtttcatgccgggttccggtgaccacgacctccccgatcgggtaggttttcccgttacgcaggctgtcggcggtctcggaccgcagggcgcacacggggacgataccgcccaacagcagcaggacaaacagtttagacttcatcttctcgcattatgttttacttggacatttgttttatcttcttgcagcgcatcctcccccttcaccaattcttgttccaaaatcccccggcggagcgaagaaagtgcaaatcccggaaacgctccggatcggacggacggcgtccctttcggcgcgtttcttgttctgagccggataaacgctcattatggaaaacacccggcaaccgatcccgttacggatccggcagcacctgcgcgatgccgtcggacgcatgcacccttccgtctcgttcgtctcctgcatcggtgtgctgctggcctatctgacgggcgtctacataacgggatcgctccacgaggcgtcgcgctggatgggggccatgctggcctgcacgtcgctggtagtcgtcctgcaatcgcacaactacaaggattcgctgcgcgccggatggacccgggtgctgggaaccttcctcggagcgctcgtcgcctacatatacctcaagatatggcccttttcgatcgtcgggatgctcgcctcggtcttcgtgctggagatgctctgcatgctggtcggaatctaccagaacaaccgcatcgccaccatcacgctgctcatcatcctgctcgtctcgcagatgacgccccacgtctcgccggccgtaaactgcctgctgcgctttaccgaatcggtcgtcggcgtgggagtgggcgttgcgctgctgtgggtgctcgaacggtggaaacgatggctcgaaccgcaggagggtgcagacacatctaccgataaaaatatgaacatggacacgatgcccctgcgttggggccacttcagagtgcttatcgtcgcttcgctcggacagatcaccggagcagggctggcgacgctggtcggcgtcatactgccgatgatccagattttccggcatcccggacttacctccctgcaacagggactcgtggcggcgaccagcctcgtcggcatcatggtcggctcggtgctgttcggagcgtggagcgataaaaagggatacctgtttttcttccggttctgccccgcactcatcctcgcggcctcgctgttcacctttttcacggccgacctcttcgggctggtcacggggctgtttttcatgggactgggcatcggcggcggttacagcctcgattcggactacatctccgagatcatgccccggcggtggaaactgctgatggtcggtgtagcgaaagccgcttcgtcgttgggcagcatcgcagcggcggccatctgtttttccctgctgcgggagtggcacgatccgcacctgtggaaccggctgctgctgctcgtcgcagtcatggcggtcgtcatgctgctctgccgcatacgtttcgaacaaagtcccggatggctcatcgcccacgggcgcatatccgaagccgaaaaggccgtgcgctattttctgggccccgacgtggagatcggcgaaatccgcaaccgccccaataaaacgcagatgccgaaggtggcttggagcgaccttttcaaacccggtcaggtgaaaaaagtgattttcagcggcattccgtgggcctgcgagggattgggcgtctacggcatcggggtattcctgcccgtgctggtcatggcgctggggctggaaacggggtccgagtcggccttttcacgaatcaccgattcggtgttgctgaccacatggatcaacctctgcatcctgccgggattcgtacttggtctgctgctcgtgaaccgctggtaccacgtgcggacccagacgtggggatttatcctctgcgccgcgggcatgggcatcctgctggcggcctacgaattccactggccggtctggatcgccgtatccgggttcatgctcttcgaactgttcctcaatgcgggcccccacctgatgacgttcatcattccgccccaaatctattccgtcgccgagcgcggcgcgggtgcgggacttgccgcggcctttggcaaactgggcgccgtcgccggcgtcgtcgtcattccgatactgctcaaatggggcggcgcttcgctggtgctttgggtgacgatcggcgtgctgctcgccggggcgctggttacggccgtcgtcggccgggaggtgcttcccgacaaggggcggtccgttcgtcccgaaatccggcgcgactgaccgtcaaagggcgtactcccttttcaacgcacgtttcatccgcagttcgcaaggctgctccagcccgcactcttcgagcagggccagatcgccgaacacgtgccgcgtactgccgtcggccacgatccgtccctgcttcatcacgatcgtacggtcgcaaaggtcgagcaccatctccatatcgtgcgtagcgatcagcgtcgtatggccgaaacggcgtatcagatctatgatctgccgccgggcgcgggggtcgagattcgaggtcggctcgtccatgacgagcaccgacggctccatcgaaaggaccgtcgctatcgcaacgcgcttcttctgtccgcccgaaagccggaaaggcgacgccccgcgcagatgcagcgcgccgacggcatcgagggcttccgtgacgcggcggcgtatctcttcgggttcgagacgcatgttcgaaggtccgaaggccacgtcttcttcgaccgtgggcatgaagagctggttgtccgaatcctgaaacacaagccccaccgactgccgcaccagcggcagcgtcctgcgcgtgagcttgatcccgcccatgaccacttcgccctgcgaaggtatcagcagtccgttggtgtgcagcagcagcgtcgatttcccggctccgttggccccgactagggcgaccttctccccgtgcgtgatgcagaacgagacgccgcagagcgcttcatagccgttgggataacggtaatgcacatcgtcgaaccggaggtagtggtgactcatctcaaaggttgtttatcagcatcgaaaggttttcggccggacggcacaagcgcagcaggacgaacgccgagcaccacacggcgagaaacagggtgtcgcgcattttccatgccgggcgttcgaacaccccctccgggatgcgccccgaaaatccccgtgccagcatcgcccggctgatctgctcggcccggtcgaaagtgcggatcagcagttgcccgacgagcgttccccaaatcttcagcggataggatctgcgcccgaaactcctcgcgtcgcgggcctgctgcatggccgcggcctcttcgatcaagacataaaggtaacggtagacgaaaagcagctgcgtggtgaaaacagccggcacccccagccgctgcatgctccggcagagaccgtagtagccggtgcttccgatcagcacgagcagcgcctgcaccgacagcagtccgcgcagtacgatcgaaaggaacgagacccaccctgcggtgaccgccagcgtcccgatacggaaaaccggctcgcggtcgtagaacaggttgaaaacgccgatgaagacgacgaagggcagcacgacaagcgaccgccggaaaatcgttccgtaactcaggccgcccatcgcgcaggcaacgatcggaaagacgaaaaacagcagcagttccggaagcctgcagagcggcacggagagcatcgtcacgagaaaaaccaccgtgacgagcagtttggaccgggcgtccgtgcgatggagcggactctgcatccgcgccgtccgctccatcgcatccaatgcgcaaagtacgtgctgcaatctgtttttcatccctgcttttgtccggcgcggaacagacaggaggcgccgaatacggccagcagaatggctccgctccctacgattcccgcaaatgtcgtgttgtaatcgggtatcacggccgtcttctcctgaatggcggcggctctgcggtgcaggccgtcggacgcaggttccaattcggcccgtcccgccgtcttttcgatcgaccactccagtccgtcgggatcggacgaagcgatccacgagaacgacccggcgatcaacagcgccaagagcgcgatcgccgcaagggcctttccgaatctccgtcttccggaggcgcgttcccggcggataccgtacagcagttcgggcttataacgctgcacgccgcagatcaccgccgccgtagccagcccctcgccgatacctataaacagatggatcgggagcatgaacagcagaaaccgccccatcggcaacgcggtgatgcccgacgcttcggtttcgatcgtcacggccaatgcgcccagttcgagtccgaccaccgaggcgagcagcgacgcggcgatgatccgtcccggcgatgcgccgcgtttgatcaacggccggaacaacagcggataggccgccagacacgacaataccgccatattgaggatattggcgcccaaagccatgaaaccgccgtcggcgaaaactaggcactggatcaccagcaccgaagccagcgtaagcaacgccgcccatgggcccagtatcgccgaaagcaggataccgccgaccagatggccgctcgaacccgttcccggaatagagaaatttatcatctgggcggcaaagacgaaggcgcccatcacgcccatcagcggaacgatgtgctcgtcccgcgcatcgggttcgcggcggtcgtttcgcggatgcttgactctccagatcgccgttccgagcaggaccagcgatacggctcccgtaacggcgaataccggcggggagaccagtgcgtcggacatgtgcatagtctgttgtttttcaggttttcagatcgccccgtccggcccctgccggaccggacggacggttattccgttttcgcgcccggctgctgcgccgccagatgcttcttgttctccggataccagttcgaatggtcgggcttctcctcgtcgtcgaacctgacgagcggcagcaggaagagccatgtcgtgatgcagaacggcccggtcagggtggcgattccgacgggcgccatcagcatatacatgccggcctgaatgaacaccgtcaccagaattcccagaacggcccagagcgccgaacggaaattcggcttgtagaacaccgtcgccagcgcaatggccgtcagcacggggctgtatccgtaaagtccatctgagatgtcggagcccgacgctttcagcgcgacgaccgtcagcagcgccagcgccgagccgatcgcggcccagagcgccgcccagcggctgcaaaggaacagtcccgcgaggaaacagattcccgtcacccacgaattgatcagaaagacctgcccgatacctttcagccagtaaaccgccagatcgccaaaacggatgctctccagcgacgagaaagccgccggaagcgccggatcggccatatgcgtcgtcggaagcccgtgcatggcgcgcgccgcaaggagaaacatccacgtgcagaagacgaacgggaaggtgaacgaattgactttccaaggcgccatcacgttgttgaatcccgcacgcacccatgtcgtcagcgccgaacagagcgccagcgccagccacatccagacggtattgcccatgaacgtaggaaacgcgcaccccaccagcacgccgttgaagccccagagtccctgctcgccgtccttggccggaaagccgagcagataccccgtcaccgtggagacggtcacgcccagcagggcgccccagcccacaagtccctgtccctcggcataggcgccccagaaaatgccgatcataaacagaagtcccgtccacgcgctgttctgaaacatcacctgcccggtaccgcgcagcagaattttgataaaatcgaaagagcctccgccggcccctccggatcgagcgatcgtatttgccatacttacaattatttaaccgttaacaaagtttctatcgccacggaaactcttcgggcagcggcttgcccttgacttcctgccgaaccgaggaacagaattcgcggacaaggcgtttcacgggagccgtctcctcacccaagaccttgtagagcagccccgcatcgttcggcaggcgcgtaatgccggccgccagcctgcgttcgcggtcgatgaaggcctgcgtccgctcgtagatgttgtcggcattctccggcggcgtcagcacgatcacgttggcgaaaacgtcgtatccgttcatcgcaccgagcgtcgaaggcggatacatttcgggccgtatgatgaatttttcgcgaaacagttgctccccgtcgggacgttcggcatgggagcagaccgacagaatgtcgtactggaaagtttcgccccggtcgaaatacttgcggccgctcatgtagatttccgaatagaacagcgtggccgagggtgcgatgcggattgccgtgtcggcgatgaaccgcgtgtgacggcacggaatcgtcggttcgggcagatattccagataagagtcctcttcgagctcgaacgtctgcgtcagccccgaatagttgtagcgcatctcggccagcttggtcgccgcaccggtcgaaatatgggcgtaggcgccttcgcggacgacaaaacgctgttcatagcgatcgccgtccacgttgggacctccggacgagaggatgtagacgcacggcatctcaggcatgccttcgtcgaaatagagttcctgctggacgatcagcggggcatggcgttccagatcgcgcatgatcgacctgccgtcgtcgtcgagttcgaatcccagaaaaagataccccatcttgcccggagtgccgacgggcatcgccttcggctcttcgaggtagggactcatctctttggctgctgcgaaattcatcgtacggcgccggttagggattccgaaactttctccttgttgttgccgaggtcgaaaagcgccatccggcggatcagggcgaccagttcgtcgatcccttcgcccgtcatgcagttggtgaatacgaacggcttgcccggacgcatcagctcggaatcgcgccgcatcacttcgagatcagcacggacatagggggccaaatcggtcttgttgatgaccagaatatcggactgggatatccccggtccgtccttgcgtggaatcttgtcgcctgcggccacgtcgatcacgtagatgaaaaagtccaccagcgcggggctgaaggtgagggtgaggttgtcgccgcccgattcgatcagcaccacgtcgccgtcggggaatcgggcctccatctcctcgaccgccgcaatattcatcgaagggtcttcccgcacggccgtatgcgggcacgcgccggtttcaacgccgatgatccgctcctcgacaaggatgcccttcagcattttacgcacgtgtttggcgtcttccgtggttaccacgtcgttggttatcaccagcactttgtagcccatgtccagaagccgcggggtgatcgcttcgatgagtgccgttttgccggagcctacgggaccgccgattccgattctgcaagttgtattttcgttcataatctattcgtttattcggttattccgcttttggggcggatcaattcataaacatgcgtttggttcccttttcgtgcagcgaggcgagaatgtcgatctgcggcacgaaggtatacatgtcgtcgaaatccatgtcgcccgccgtgtcatagagctcgccgagcttttcggcggcccggaacaggatgcgctgcgtgtcgtagtgcgacacgcgcacgcagcggagagccgcgctgacgaccatattgaccacaccgtactggtgggagcagaaaagccccttttcggagattccgcaggccgcgaatacgatgccctgcgccacgggataagtgccgggggtacggccgccggcgatgtcgccgagccacttcgctgcggtttcatcgggaaagacatgtttcgacagctcggccagtttcttgcccatgcgtcgggtcatcagccgcgcctcggcgttcatcttgcagagaacggcctgacggtcggcattgaggataccctcgtaataaccgaggttatagctgcggaaagcgtgcagcgccgcgactccgtcggtgaaggcggcctgccggacaatgtcctgcgtatattgttcgagcgtcgcggcgtcgtgcaccagtccctcctcggcggccgtttccaatccgttggagaaggagaaggtcccgaccggaaaggccgagtcggtgaattcgagcagccgcatgacggttgttgcgtcgtcggtcataagggcgggtttaatgcgcgtgcacatgttcgtgatggtggtgtacgtcgctgtcgggccccgtgccgccgaacagacgccggatttcgtggggcgccaagtagggaatcacctccgaaccgggctggaacgagtaggcgacaccttctatatggtgcgtacgcattacgctgtccatcacttttttatccaccgtcagcggaatgtagacctttgtccccttgaccactgcgggccaatgctggttgccgatggcatgaccgagttccaccgagatatggatgatcgtttccggcgtttgacgcgccagatccgaaaggtccgcgaccagcacgtcgttgagccggatgcggatggccgcaatgcggcgctgttcgggcagatactcgataatatcgccgtcgagcatctgcgagtggcgtttcaatgccacggcgtattcgttttcccggtcgcctttgaccacgaagcggcttttctgggccgtccactggtcgagatcgatatattcgatttcggcttcccgcgctttcttcacccattcggggtcctgcagattgcctatgatttccgtatatattttcatcggattcgtttttaatattcgtttttaatttccgggagcatcccctgcggcatgcccccggaaacaggaaaccgatccggggccggatcggatccgaaggcggaacaacaaaccgccccggatcggagaggccctcccggctaactgaaccagagcagctggctcagggggaatttgtcggcaggcttgacgtaagcgcggatgtcgttgaccagcacgtcgaacgtttcgggattcacgtcgatcttcggcattcctccgttgcgcaccatgttgtatttggtaagctggcgggtgcgccgcacgggctgcaccatacgatgcaggtggagacgctccttgataccgctctggaacgcggcgcccgatacgaacgaaaggcaggtttcgggcagcgtacggccgaaagcgccgtacatcggacggtaatagcacggctgcggcgtcgggagcgatgcgttgggatcgcccatgttcgaccagttgatcaggccgcccttgatgaccatcttgggtttggcgccgaagaactgcggctcccagagtacgaggtcggcgaccttgcccttctcgaccgatccgaggtagtcggaaacgccgtaggtgatggccgggttgatcgtgatcttggcgatatagcgcagcacgcggaagttgtcgttcccgtcggcatcctcggcgagcttgccgcaggcgttcttcatgaacgacgccatctggaacgtgcgcatgaacgattcgccgatacggcccatggcctgcgagtcggacgaaaccatcgacagtatgcccagatcgtgcagcacgttctccgcggcctgcgtttcgggccgcacgcggctctcggcaaaggccacgtccgacgggatcttcggatttaggttgtggcagaccatgatcatgtcgaacagctcggcttgggaattgaccccgaacggcagggtcggattggtcgacgaaggcagcacgtagggcatcgacgccactttcagcaggtcgggggcgtgtccgccgccggcgccttcggtgtggtaggtatggatcgtgcggccgtccatggcggcgatcgtatcctcgacgtatccgctctcgttgagcgtatcggagtggatggccacctgcacgtcgaaacgatcggcgacgcccagcgcggcgcggatcgcagcgggagtcgagccccagtcctcgtgaatcttcaggccgcaggctccggcctcgatctgttcttcgagcggctggttcatcgagcagttgcccttgcccagcaggccgacgttcaccggaagcccctcgatcgactccagcatgcgttcgatgttccagcggcctgaagtgatggtggttccgttactgccgtccgtagggccgattccgccgccgaacagggtcgtaataccgttgctcagacaggcgtaagcctgctgcggggagatcatgtgcacgtggccgtcgatgccggctgccgtcaggatcaggtgctcgcccgatatcgcgtcggttgcggtgctggtcaccagatcgggatgcacgccgtgcatgatattgggatttcccgccttgccgataccggcgatttttccgtccttgacacccacgtcggccttcacgacgcccagattggcgtcgatgatcgtcacgttggtaatcacgaggtcgagcgccccctcctccgaagtcatcgtattggccagccccatgccgtcgcggatggtcttgccgccgccgtagacgacctcgtcgccgtattcgcgcaggtctttttcgatctcgacgtaaagatcggtgtcacccagccggatcttgtcgccgacggtaggaccgaaaaggttgttgtattcttgacgtgaaattgttgccatatcctctattttttagtgttgttgctttttttcatagcggcctcggcatcgctttccgaaatgttcttgaaccctgcatgccgggctttgcgcacggcatgcatacgtgccgggaaataggtgggcgcatcctcgtcgcccgtatatcccatcaccagaccgttgaagccgatcacgcggcgtttgcccgaataggccacgacctcgacctctttctggtcgcccggttcgaaacggatggcggtcgttgcgggaatgttcaggtgacagccgaaagcggcgtcgcggtcgaactccagataacggttgacctcgaagaaatggaaatgcgaaccgacctgaatcgggcggtcgccggtattgcgcacgacaagcttcacggtcttgcggccggtattgtactcgatcggaacgttcatcaggatttctccaccgacgacgacgggctttgcgggtttgaagccgggtttattcggatagagactcgccgcctgcgcctgatttttcgcaggggcgggatttttcgtattcatactcaggatgtttaaaattacttaataggatggtggatgctcaccagacgggaaccgtccgtaaacacggcttcgacctgcagcaggtcgatcatgtcggcgacgccctccatgacgtcgcttttcttcagcacgctggccgctcctttcataacctcttccacggtcttgccttcacgcgctccctccagtgccgtggacgtaatataggctacggcctccggataattcagtttcagcccttttttcatacgccgttcggcgaccataccgagcgaaagcagcatcaacttgtcaatctctttcggtgtcaagtgcatagtaaacgatttttatagttaatccggctccgcatccccgaaggccatacatatcccgccggggcagcggtccgccggtactgatcagcggaggttccaaataggatgccaaaagccgcccccccgtggcgatccgcggcaaaatacggaagcccggtggcatcaaatttgttcggggaagaacccgaatggtagaatcaactaaaaatgtgtgaattatgtttaaagcgatgattattgcggggctaggcggttttatcggcacatgcctgcgctttctgacgggaaaactggcccatgtcattacggtttcggcgttcccgtggggtacgttcgccgtcaatattatcggcagtttcgtgatcggcatcttcttcggtctggccgaaaagacccacgtcatctcgccgtcgatgaacgtctttctgatcaccggcttctgcggcggattcaccaccttttcgtcgtttgccgacgacatgtacctgctcctccaacagaaacactggctctatttcggcctttacgtcggcctgagcttcattctgggactggtactcgtatggctgggacgttcgctgataaaggcggtctgaccgcggtcggcgcctgagcgaccgcacgccgccgcacaaaaaaagggccggacaatatgtccggccctttcatttatgatccggttcgggcttcgcccggaacctgatgcaacagggctgtcaggcccttcgaaatcggaattacttgcggtagatcttcgtgtagccgtagatagcctcgtcgccgagttcctcctcgatgcggagcagctggttgtacttggccatacggtccgaacgcgacgccgaaccggtcttgatctgaccggagttggtagccacggcgatgtcggcgatcgtcgaatcctcggtctcgcccgaacggtgcgacgtaaccgaagtgtagcccgcacggtgagccatctcgatggcgtcgagcgtctcggtcagcgtaccgatctggttcaccttgatcaggatcgagttggcgcagcccatttcgatacccttcttcaggaagtccacgttggtcacgaacaggtcgtcgcccacgagctggcacttgccgccgatctcctcggtgagcatctgccaaccgtcccagtcgttctccgacataccgtcctcgatcgagtcgatggggtatttggcaaccagtcccttcaggtactctacctgctccttcgacgaacgcttcgcacccttctcgccttcgaacttggtgtagtcgtaaacgccgtccttgtagaactccgacgaagcgcagtccatgccgatcgacacgtcgccgccctcttccttgcggccgggcttgtaacccgccatcttgatggcctcgatgatcgactcgatagcgtcctcggtgccgttcagcgcgggagcgaagccgccctcgtcaccgacagccgtcgaaaggttgcggttgtgaagcactttcttcaggttgtggaacacctcggcgcccatgcggatagcctccttgaaggtgggggcacccacgggacggatcatgaactcttggaacgcgatcggagcgtccgagtgcgaaccgccgttgatgatgttcatcatcggaacgggcagcgtcttggcgtttgctccgccgatatagcgataaagcggcatgccgaagtagtcggcggcagcgcgggccacggccagcgacacgccgagaatggcgttagcacccagcttcgacttggtcttcgtgccgtcgagggctatcatggccttgtcgatgcccacctgatcggccacgttcatgccgataacggcgggagcgatcacctcgtttacgttcttgacggcgttcagaacgcccttgcccagataacggctcttgtcgccgtcacgaagttcgagggcctcgttctcgcccgtcgatgcgccgctcggaacggctgcgcggccgaatgcgccggatacggtacgtacttcgacctcgatggtcggattgcctcgcgagtcgaggatctctcttgcgtgaatctctacaatctgcatagttgtaaatgtttaatttatggttttaaatactgatatgccgttttcgaccgcaaaggtaagaaataattgtgaattgcggtttcattattgttatttttttcacgaaagacggatgcggtttcgggaataaagcagaatatattatctttgccggcgaatgcactcctctcacttgtaaacaactatcaattaatgcgaaaagttctctcattctctcttttcctgatgttggggctcatcgtctcgcaaatgcttccgggcacgctcggtgtaggatacgcggcgttcaagaagtgttccgacacgctgctttacatctgcctcggattcatcatgatcaacgtcggccgcgaattcgaaatcgacaaaacccgctggcgttcctacactgcggactacttcatcgccatggccacggccgcgctgccgtggatactcatcgtcctctactacgtcttcgcactgctaccgcccgaactctggaccagcggcgaggcgtggaaggaaaacctgctgctgagccgtttcgccgcgccgacttcggccggcatcctcttcacgatgctcgcagccctcagtctcaagaaaagctggatttacaaaaagatacaggtgctggccatcttcgacgatctggacaccatcctgctgatgatccccctgcaaatcctgatgaccggcctgcggtggcaaatgttcgccatcatcgccgtcgtcaccctcctgctggccgtcggctggcgctggcaggcgacgtggaacgtacgtcaggactggaaaaccatcttggggctggccgtcgtggtctgcgccctgacccagctcgtccacatcgtcacggcccggctttacggaccggagaacagcatccatatcgaagtcctgctcccggcgttcgtcgtcggcatgctgatgaaacacaaggagatcgacaccgccgccgaacggcgcatcaccaccggcatctcgttcctcttcatgctgctcgtggggctgagcatgccgctcgtaacgggcgctccgggcgacacggccgccgcgacgtcggtcaccggctcgcagcccatgatgccgtggggcacgctggcgctgcatgtgttggccgtatcgttgctctcgaacctcggcaaactggtgccgctcttcttctaccgcgaccgcaagatcagcgaacgcctcgccctctcgatcggcatgttcacccgcggcgaggtgggcgcgggcgtaatcttcatcgcactgggctacagtctgggcggcccggcgctcatcatctcggtgctgacgctggtgctgaacctgatcctcacgggcggcttcgtggtgtgggtcaagaaactggccctgcgcacctacgcgcccgaagcgcagcagtaacccggctaaacaaccccatattcacaatcaaacgacggaaaccgtgatcgaaattacagacaaggccctgcaaacggcagccgccaaagggatggacgaattcctccgggtctttacggacaaatacaaggagacggtcggcggagacccgacggccgaaacgatgccgctgctcagcggcgaacagcactcgctgctcgcctaccggattttccgggacgaggtgaccgaaggcggtttctgccagcttatccagaacggctacggggcctatatcttcggcaatccgtttgccagagtcatgcgcctgtggggtgcggagagtttctcgaagctggtctaccgcgccaagaagatctacgacgccaaccgggaggatttggaacgggagcgcaccgacgaggagttcatggcgatgtacttcggtactacccattcgtttcccgagaggagaaaaagggcgtaaatattaaatattcagcgatttaatctttgtacagggtttcttcttcgagggattccaagcataataaggtaattccagacgaggttacggtttccagatcgttacctcgtctgttttgctgtattttgcataaaatattcgtttgcaatttcttgcatcgcgcttcatcttgacagacaactctgaggaaattagttttaacccccaaatttcatcggagtatgcgcagtacattcaaggttctgttctacctcaaaaaggacaaacacaaagttcagccggttgttcccgtcatgggccgtattaccgtcaacggtacgatcgcccagttcagcgccaaacttagcgttcctccccatctgtgggaggtgaagggcggtcgcgccaaaggcaaaagcctcgaagccgaccgtatcaaccgctatctggataatattcgtatccagatcggaaagcattaccagtctatctgcgaccgtgacggatatgtttccgccgataaggtgaagaacgcctatctgggtttcagtaaaaggtataaactgttactggagttatgcgatgaattctgcaaagagtacaagaaccgtatagatgtggaccgtactatccattccttattccgttatcaaacgctacgacgcgatttgagtcttttcatctgtcaggactataaagtcaaggatataccccttgtggaactggatcagtcttttgcagagaagtttgccgcctatctgaaacatgtcaggggccttgccgacacgacgatcagcgttgagatcaaatcactgaagcatatcgtcaagaaagcgtttaacgacgggcaaatggagaagaatccgtttgcctattactactactttgccgaccagccggaaattgaatatctcaccgaagaagaaatcaataaactaattatcggcaaagtcaagcagcagcgtcaggatcggacacgggatatgtttctgttctgttgttttacgggcctgtcctatgccgatctggccaaactgagttatgaggagttgaaacaaactccgaacggagcatggtggattagcagtatccgtcagaaaacgaaagtaccgtttacggtaaaactacttccggttgcgaaagctattcttgaaaagtatcgtattcctgccaaccgattcaaccggctctttcccgagaatccgggaaaggtttttccggtagcttcattgaaatcctcggatgtctgcctgaaacatatcgccagacaatgcggaattaccaagaatctgaaattccacatggcgagacatacctttgcaacgacggtctccttgatgaacggcattccgctggaaacagtgtcaaaaatgttgggacacaaatatacgaccacgactcagatttatgccaaggtgacaaaccaaatgatagataatgcgataagccgaatagaggaccaaattggcgaacggttccaatgtccaactctgaaagaagagagcgacggctaatccgaaagacatcggcggaaaaggcgacattctgcggttcggatgccagtcgcttcgctacgtccatatcagaaacccaaagtaatcgcttatcgcattgtctgtttaaaatagtcgtctgttgttcttcttctcgtggagataattcaactcgtcgctgtaaattccgattacaaagcgcagcatattgtcgaccaaagctgtaagccttgtattctcattcccaataagtggaggattgccgatactttgtacttggttgccgcactgatatagatcgccgaacggttacggcagtccgccggggcaaagaacgtgcgttcgaaatccggcagcggaatctttttgcgacggaatccggccagctcctttacgtcactcgtttgggtattggcgtctgtcctttcagcagtcggagccgatgctccggataccgtttccgatgtctttccctcgggagcgtccgtattttccgcttccggttcgggaatccggcggacgactttcgaatccaaaggggcctatccggcgatcatctggcgcatcaattcttcgtcgacttcgatacggggacgcttcgatggttttgttgcgaggttgtcggtttcttttaatgaatccatggtacaatgtttttaagattgaacgttcgctttatgcttgtaaagcgtgtgtgtctgttttatggtttaaaccattcaaaataccattttctgcttcacgcagtttatatcggaataatgaacggaacaagaaaacctacctttcatgatgcaagataccaccgactgaaatacctcggttttgatgtccggccacgaccgctccagtccgcaccgagagcttgttttggtgcccggacggttgtaatattgcaaccgggaaagacccgtcctcgaaagccgtagcggaggtttttcaaagttttcacaaaaaatttccgccgcggatttttgttatcgccagataacagcgagctgtacctttgtcggacaaatgccaatttgtccgacaaaggtacagctcgccctgcgaggccggtgtcgctcccctgtcgcgccccttttttaagccatatatggataccgaccgaaaactgacaaacgggattattttatctgctgaactgaatcagagattgactgcttgaatattccgattaatgcatgtcttccaaaaaatccaatatttcccggcgaatctgccggaatctggacactgacgtgtcgtaccggtcgaaatcgaatatgatcgcattgacgaaagcctgtgcacggatcgaatcccgggcctcaaccattttcagcaggtcgtagtcacggatgccgtcacgcatggctgccagccgaatcgacgggtagagcttacggtaaccggggtagacgatatgcgagtcgccgccgggccagtcattggcgggggcggaaacgtctccgaaaggatcgccgttcgctccccatgcgttgaagccccagtgaaggtatcccggagagtcgtatttgtagtttatccaatgcagcaggcgtgtcttgatgagcggcagtgttacgtaacggtttgcgaaattcccccggggatacatgcaggtgtagaaccagcaactatgtccggctggcattgttcgatagatttcccatacgaattcgtcgagttgtggcacgaggatgtcgatcagcgccgggtcgtaggacgaagaacggtaagcttcgatgattcggatgtcgggggcagcctgttttacctggcgggccaatccttcccaggaggtcttattttcgttgagcggttcgtcggcaatgtgttgtgtgtagatgtcgagccaactgcggccgcttccgtcatcgatcattctggaacgcaaatgctcctgcagagccggaaaatacgctgcgatgtatcgttgcacgcgcgggtcgtcatggggcagacgttgataaacataggagcccttgccgtcggggaccggtacgttggcccagaaaggatcggtccacccgttgcgggaccgcttggcgaaatggttggcctcgatcagccgtacgtcggcgtgtcggagcaggaattcgatcgttttgtccatccgtgagaaatcgaacgtcagccctttgccgtcggctgtcggaaccggcgttcccgtttcgtagagcaaccagacgttctgaccataggccgaggcggtttcgacgagccgccgcatacattcccaataggccggtgaatcgtcctccacggattcgttgtcgttcatgaaagagaatttatcggggaaataccagttggtaaccaataacgactgttcgggaagcgtgaccggataaacttgtatggtgaattgtcggtcggcaacgatccgctttccgttctttagcccggaaatgcgtaccgatccttcgtaaagccccgcttcggcatcggccggaatcggaatgtccaaccagagcaaagctgtcccgcctgcggcgatagatacggtggtgtcggtcagaatgggatcgggatattctccggacggtgattgcagggcatcgggggccgccggcacgtaggcgtgggaagcctgtacgttccggacccagcccagaacggctttgtcgagcgaagttccctgctctgttttaagactccgaaggacaggagtcattgccgctacggagtcgtcagcggagataacgaattgcagaacggcgttctcgccgcgggccacgcgaacggtatcgtccccggcaggagggtaaacgattccgggaagaacattggtcaaaggatcgatgacgcggatcgtgagtccgctttcactacaggctaccggtagcatcaggagtgcagggcaaagagtccggatcgtccggttgacgagaagtcggagcggggaaatgttcatttcgggttcggtttgaattcttaattgcattgcgggaaaacagtaagccggagttccgtgcatccgtagggaatcagttcgagatattcgatacggtcggatacggcgcgggctatcccttcggccggaaggcgcggcgtgtagcgtcctttttccaattcccagtcgatcggtttgacgggaaccgagattttcacgggcgtatgttccggatcgaacggatagcttcctgcggctgcgggttttgtccgaatgaccttcaggggtatgaccggatcggagcaaagggcatagttccaaggtccggcaggctcgatgctccagcattcgaattcggggttgccgggaactttgccgttcatattcgcatagaccgtccggtcggctgttttccgctggggaacaggataggagaagagcagaggtccgcgctgcacgtagattccctgtccgggaacggtgttcatgacgggttgcatgctgagacacaaccgaatccggtcgccgttcctgaatttgcgccggagggtcacgaacgtgccggcgggacatgcgtctcgccacagtttgccgttgacatatattctggcatccctgcaccatgcgggaatgcgcagcagaaacgggatatccgtcctctctttcaggccgaaggagaactcgatctccccgttgaacggataggaggtccgctgtgcgatgtggcactgtcggccgttcggcaggtcgaacgttgcagccgaaggtccgtagagcgcagcggcaatagagccgtctttcccgcgtagccacatatgtgcgacgtaattgggcatgaaacggtgaacgtttccggcgcagcactccgtttcatgcgtcggccggaaagccatccaggtcgaaccgtggaagaattcgttgtgatttgaacgccccgttgcgattacctgattgacggacgagaaatactgcaacgatcggaaatccttggtaacggctcctagtccggcattgaagaccgctttttctattttgtcagcccaccggacttcgcccgtggtcaggagaaattgctccagcgtccaggtgtagtcggaaatgtcgcaggtttcgtgactgttgatgacgttcccgtttccgacgagcgcttccgcactggccggaacgccgtcggggagcatgtggtcgcgggtgagcttgcgttcggcgttgagtgcaaggtccaggtaatatcgtttgcccgtataggcatagagcagcatcgggagtttcagttcttccatgcaggtgacgccatgcatgacgaaccgttcgtcgccggccgcgactgcgggcgtcaggtccccgaattttccgccattgtaggctctctcgcaaatatccagcaacttcgcattgccggttttgccgtaagtccacaacattccctcgatgctgacgatgttgcgccatttctcgacctgctcctgcgtaaagttcatgtagtgcctttccaaggctgcggggatcgccggatcgcccgtgcgctcgtaataggcttgcagcacccggaagtagacacacatgggccacatcgactcaatcgctttgttgcccaaaacacctgtggacgatgcgttggccagcgtgtagcgaatcccctcctcggctttggcgatcatctcccgatcaccgagcaggtaacccaggcggagcagaccgtcggtgtaataggctgtctgctcgtagcgccaccagtcgcttccgtaggtttcggtgttacgtccgatctcacccgcccaaaggcaggagtcgtacggataggacatcgcctcgggatgtcccgtaagtcccgtttgttggcggtggaggaattcctcgatccagccctgcggctctatgcagccgatcatgccgccctgaaactgggcataaggggcctgggcgttcgtcgcggtaccgacgaggcaaagtgcaataattgaaaacagcttcttcatgcgatttcttgactatttgtatttttcgactcttgcatcccggatgacacctttccagtcgagcccgaaagcgaaatcatatgtatttccttccgagtccgtataacaaaccatatctctcggaacgtcttcatgctgctgttccacggttttcatgtctgcgggcaattgcatcggcagaagtgccgacggttcccgccggccggagataatatccagcacggcctgacgctgtaccccgaaagcaagcagtatggcatcggccgaaggttcgaattcggccggaacgaacggtctggtcgtggaaacgacagccacgacgggcttgtctcccatctgccgtttcgttccgagtacccgtttcaactcttcccggttggaactccggacggttttcccgcggtaactccggtcgatggacggttctttcgggtccccgccggcaatactctcggggcgtgcgtggcgggccgtgtagtcgccgtattgcaggctgatcgggacataaccgttgccgcccttttcccgatcggccgcatcgtatccgcagcctccgtcgggttcgtcgataaaaacgatcgcgaagtcggcattttcggggctttctgccaattcgtaatattgtttgaccaaagaggtgtctacaggtaggcgggattgtccgcattcgggcagatatacgctccggcgggtcgatgcgggcagggttcccgcccggtttttcagcaggacgaccgaccggagctgcgcttcgtaaccggcttgcataaattccggattcccgaccgtcgcttccgtccggtccgggtctacatagggattttcgaacagaccggtccgaaaaatattgagcagcaaccttatggcggaacgttcgaaccgctcccgggcagatttttcgccgaattcggcggtccacattcggtaggcttccagcacgggacctttgtcgttgttgccgccgaactggtctactccggctttgagcgcttcgtaatgccgctgcgggatgctcaatgcctccactccccagcatttgccgtcagcctcctcgatgctggaatagtcgtgcgtgatgccccaatccgtgcagacgacgccgttgtatccgtatctgttccgcagcagatcggtgacgatatatttgctaaaaccgttgccgaccttttttcccgaggggtccaccccgtgggaaaccgtataatagggcatgacggctgcggcctttcgtgtcttgccgttgaggcggaaagctccttccacaaagggccggatgtgttgctcgaaatttccgccggggtaaacagtgtatttcccgaagctgaaatgggcatcccgtccgccttcttccgggccgccgcccggccaatgtttgaccatggcattgacgctttcatacccccagccgtccgcaatctcggcagctccgacggaggtctggaatccgtcgatataggcccgcgccatatcggtgtccagatcggggtcttcgccgaaggtaccgtagaaccggttccaccggggttcggtcgccagatcgatctgcggcgacagcgctgtggcgatacccaaggcgcggtattcggcggatgcgatccgtccgaacttttcgaccagttcggggtcgaacgtagcggccagcccgagcggactgggccacaacgaaatctttcctcctgaccctgcgttgtattcggcccaggctcgggtttcattccggggatcggaactgatattgaccggaatgccttgtccgaggccttcgacgaaggcctgcatgttgttgttccattcggctgcaatgcggggactttcaacccggacgacgagcacggcccggagattgtcgtcccggaggaacttccgctgtttgtccgaaacagccgagtggggaagtccgctttcccggagtgaggtcccgttgtaggtcgaggaccagtaacctaccgaatccgtcgggacggcctgatgggaactgtataacatcaatccggcaatctcttcgacggagagtcgctttgcaaggtcttccgcccgttcttccggggtgtaccgccaatcttcgtagcagtcgagaatcccgtttcggttcaggtctttgaaagcgtatccgtcggaatataagatacggacgccggatccggggaaatagcccagagtctgtcctccgtcttgccgaatcagacagtaggtgtcatgcggctcgaccgtccattttcggccgcaggcacagagtatcggcaacataaacgccaaagatactattcgacgtacaagatctgtttttgttgtcatatcgttatcagggtcggttcgttctttaggggacttgggaaagcagttacaaaagaatggatttttatcggccgcggggttgaatattttccggaaagattctttcccgtatacggataccttattgaaataaaggcgaaattgcagttgtccggacgttttgagccgtattgcgccgttctctttcggccaaatgatcgtacaattcggcgggatgcagttgtgtttcccgaaaaaaatgtatactttagtttccgaaaatacccgttatgcatcgtcgctttcttatatcccgttttttcatagtctgcatcggatttgtcctttccgagatacagatcgttgctgccgagtcttttcctcaggtgcgtttcaccccgttaccttccgacattctgccgtcgaacgaagtgcgcaaactttatcaggattccgatggatatatctggattccaacttataacggattggcccgctacgatggatacggagccatcacctacggtatgcgtgatgtttcgaacgggttgttcaacacgttcgtcaatgtcgttgccgaggaccatgacaagaacctgtggatcggaaccgagcacggcctttttcggctcgacaaggtttcgggaaacatcgtggccgacgaatatccagagttggcggattgcaacatcgcagtcattctgtgcgatacgggcaacggcatctggatcggcggcgacaagggccttttccgcaaaaatgcgctcgaccgtaattttcatcccgtcccgatctccaattcggcgggtcgtcccgtcaaggcggtcacctccatcatcaaggatgacaaactgaacctgtggatcgccgctttcgatcagggtttgttgcgttatgatatccgtgaggatcgcgcctatgcttgcgacgatgccgtgctgcgtaaagcacatgttttggcacgtgatgtcgcgggtaatatctgggtgggtacgtggggcgccggagtggtgcggctggttaatcctctggccccgggaccgacccgttacgtgcattataaacacgtgccgggcagaacgcactcgctgctcgacgatattatttacgatattgaggaaaatcccgagcagaataccatctggatcggtggtcgcagcgggttgagcatcctccacgacatcgacaatcccgattcgttccagaatttctttcccggcgacaacgcgggagacctgccctataacgaggtgaattcgatccttcgaacccgtgacggactgatgtggatcggtttgttgggtggcggcgtctgcaaggtccagaccagcggaaccaaattcgagtccgatcggctggaaccgatcagaacccgttacaacacgagttctgttcgaagtatgtattacgccggaaacggcgacttctggttcgggctgcttgatttcggccttataaaatacaacattcgaagcggtaaaatcgtcgattaccacgagcatcccgatttgaagtcgcttccttacacttcgaccgtcaatacgatcatccgccgctcgactaccggggaactgtatttcggaacgcaaaacgccggtatttgggtgtataacgaaacgcagcacaaggttcggcagatcaatcatttcaaccagccgaactttctggacgactgcgtgattgctctgtgtgaggatacgcacggcaatctgtggataggctcccggttaggtatttacgtcgaatcgacagacgggcgtttccacaccgctgctgaatggctcggatacgctacgccattcgatcagacttatgtgttcgacatctgttgcgacaaagcaggcgatgtctggatcgcttccaacggtcagggcattctgcatatccgtacggcagacggagcctggaggcagtatacacgcgacaacggcatgatttccgatcatgtctattgcctgcaggccgacgatacggggtgtatctgggccggaacttttgcggacggacttgcggtccgtattccttcggaagggagctttaaggccgtgtcggctttcccgaatctggaaaacaaaggtatcggcaatattgcccgggatgaaaacggccggatgtggattaccacgaataattcggtcttttccttttcgccggacagcctgggcaatcccgagcatatcaatacctatattatatcggccgacatgcagtcgttcttcttcaaccgaaacgcttcggcgcaggtcgattacggacgcattgctttcggaggatcgaatgggctgatgatattcaccggcaatcgcacgcagccccaccagacgagactgccgatcgtgctcacagacttcaaggtgcacaatcgttcgttacggaccattcccgcacgggaacgatcgcgcatctctctccgggatatcgattacacggatgccgtgacgcttacgcacgaccggaacaacttcttcatcgaattctcgatgctctcctatgccaatccgcgcgatcatatttttagataccggctcgacggatttgataaggagtatgttacggccgattcgcaccaccgtttcgcctcatacagcaatctttcaccgggaacctacacattccgtctgcaggctgccggggaaaacggcgtgtggagcagcaacgagcggacgctcacagtgcggatactccccgccccgtggctttcgtggtgggcctggacgatctattccgtgctgctgctggtgctcgcctatggggtcgtgcggttcctgcgctaccggctccggctgcgtcaggaggtgcagatttcgaagttggagcgacaaaaaaccgaagaactgaatcatgccaaattgcagtttttcaccaacgtcactcacgaactgatgactccgctgacgattattcttacttcgctccagaacttgaacaacggcacaggggacaatcaaactctttacggtgtcatgtcggccaatgcgacgcggctgatgcgactgattcagcagatactcgaattccggaaagtcgagagcgggaatctgaaaatccgtgtttcgcatggcgatgtcgtcggattcgttcgccggtgtgtggaagcttttgccccgcttgtggcccgaaagcagctcaaggtctatttccgtgcttcgtcggaacaggtcgacggctggttcgatcccgacaaactcgataagatcgtctacaacctgctgtccaatgcggcaaaatacacgcccgacaagggtgaaattatcatccggatcgaaaccggagacgactgttcggtctgcatttcggtcgccaacagcggcgaactgatgacccagcagactatcgacggactttttcgccggttttacgacggcaattaccggaaacaccatacgattggaaccggtatcggtctgtcgttggtcaaggatctcaccgacctccaccgaggttcaatccgggtgtcgagcgacgagcaggacggcaactgtttccgaatcacgctacccataggtcgagatgcttataccgaagaggagatcgacgatgataccggagacgatgccgcggaaaaaaattacgaaggggccggagaattcgttccggtgcagcccgatgtggcgatgaccgataccccctcccgcacacgcactgaccatacgctgttggtcgtcgatgacaacgaagaactgctcttgttgatctccaatcttttggcgccctatttccgaattgaaacggcatccgacggagaagaagcgcttcgtatattgtcccgacagccggtcgatctggtcgtttcggatatcatgatgcccggcatggacggtatcgaattgtgccgacggatcaagcagaccttcgaatactgtcatattccggttatcctgcttacggccaaaaatgccgacgaaagccggattgaagggtacaattcgggggcggacggctatgtcaccaagcccttcaacctgcagttgctctacgctcagattgtcaatcaactccgaaaattggagattcggggcctgcatttccgcaaccagccggtttttgaggtggagaaactggagtatacttcgatggacgaaaagttcatgcgtcaggctatggcgtgcgtcaatgcgcatatcgacgattgcgaatttgcacaggccgattttacccgtgaaatgaatatgtcgcgaacgattcttaccgaaaaactcaaatcgctcaccgggttgactccggctgcattcatcattgacgtgcgactgcgtgctgcctatcatttgctcgaagagcagaagaagatgcgtattgccgatctggcctatgcttccggattcaacgacccgaaatatttcagtacgtgcttcagaaagaaattcggattctctcccaaggaatttatcgacagactgaacgaaaaaggcgataaaatcgcttgattgtccgcagaagcgggcctacaaccgtttttcggtaaaaattcgacctgcatgatccatgtcaggagtattttcgtacccggtagattttgtcccggcagagtggatggaatcggctcaatccataggatatgattatgaaactcatttttgcaatctccattgtcgctctttcgttcttcggcactgcctgccggagatctgtcggcgaaatgattctggtgccgatgccgcaggaggcaacctttacgggaggttactttgaaacggacagcgcccgattcgtggagcgtgcaggcgatgggtacgttgcctgccgaatcgatccttcggctccggagattcgtccggagggttaccggctgaaagtgactcgccggggcattgaccttacggccctggattccgcgggactgttctacggccggcagacgctgtgcctgttggcgaccgcacaggggattccctgcgtggaaatcatcgataatccctgtttcggttatcggggtattcatctcgatgtttcgcggcactttttccccgttgaaacgatattccggctcctcgatgaaatggcacggtacaagcttaacaaatttcatttccacctggcggataacggcggctggcgcatcaggatcgacgcttatccgctgctgacccggctgggagcattccgtacggagtccgactggctcgaatggtggagttacggcgacaggcattatgtacccgaggacacaccgggggcctatggcggttactatacgaaagaggaaattcgcagaatcgttgcctatgctgccgaacgcttcatcgaggtgattccggaaattgagttcccggggcactccgacgaggttttcgcagcttatccggagctctgctgctcgggccgggcctatacttccggcgagttttgcgtcggcaatccgcagtcgttgaaatttatggacgaggtcctgaccgaggttctggagttgttcccctcgaaatacatccatatcggcggcgacgaggccgaccggacagcttggaagagctgtcccagatgccggcatctggccagggagttgggcggagtggaccaggtgcaatgctatctggtcgaacacgccgaaaagtttctggcggaacacggacgcacgatgatcggatgggatgaaatcctgaagaacaacctgcgatccacctctacggtaatttcctacagggggcagcgaggaggcatcgaggcggccaaccgcggttacgatgtggtcatgtcgccgggcgagatcctctatttcgactggtatcaggccgatcctcatacacagccgcgcgcgatgggcggtttctcgccgattcggaagatgtacggttttcatcccgtccccgatacccctgcaaaggcggccgacaatgaatcgataattcgcggtgaattcgtttcgccggattcggtcgaatatatctatgacggcggcaaagagcacgtcatcggggtacagggttgcacatggaccgagtttatagaaacggaaaaacatttggaatacatgattttcccgcgtttgctggcagtttccgaacttgcctggactccccgggagcgacgtgagtggaatgatttccgtcgtcgtatcaatgttcatgtatcgttgctgcatgcgcggggaatcaatgcttttccattgagcgacgacgttgtgattacggctcagatgctttccgaaggcaaaaaggcccgggtgacgctcgacacggagaaatatcccgccgaagtacgctatactttggacggtacggccccggttcccggatcagacctttacgacgggccttttgtcgtgaaagcggggacaaccgtccgggcggcgctctttgtcgcaggcaggatggaggggaccatgacggaactctatgtcgatgcccgccgcaatgtcgataattactatacttatctgaatactcccgaggtatacgcctcgacagaccgttaattgatactttatgaaaaaactactgatcgcactgtttttgtttcccgtgacgctggtcgtggcggttccgtctgcaaagccccggttgggcgaggctccggtccggaagatcgttgcggctatgagccttgaggagaaggccggcctgctggtgggaacctcaatggagggttacgctggcgagggcgctgtaacgggccgcacgttgaaaacagttcccggttcggccggaactacccgctctttggaatcctacggcattccgacaacggtgatggccgacggtcctgcgggccttcgtatcgatccggaacgtgcaggagatgcacggacttatttctgtacggcttttccgatcggcacgatgctcgcctcgacctgggacgaggcggctattgaacgctgtggcgcagcgatgggtaacgaggtgctcgaatatggctgcgacgtgattctcggtccgggtatgaacatccaccgccatccgctctgcggccgcaatttcgaatattattccgaggacccgttgctgagcggcaaatgcggcgcggcgatggtgcggggcattcagtcgcaaggcgtagggacttcggtcaagcactttgcggccaacaaccaagagtcgatgcgcttacagaatgacgcccgggtgtcgcaacgtgcgttgcgtgagatttatctgcgaggattcgagatcgccgtcaaggaggggcgtccgtggacggtcatgtcgtcctacaatcgtatcaacggaccttatacgcaggagagccgcgagttgctgaccactgttctgcacgacgaatggggctacgaaggtcttgtcgtgtcggactggatcggaaaacgtaacaccgtggcacaagtacatgccggcaacgacctgatgatgccgggagaaccggctcaggcgagagagattgtagaagcggtgcgcagcgggagactcgccgaggcggatgttgaccggtgtgtgacccgtgtactcgaatatattctgcggacgccccgtttccggaaacaagccgtgtcggagactcccgacttggaagcacatgctgccgtatcgcgtcaggtggcagcggaaggcatggttttgctccgcaacgaaggcgctgctttaccacttgccgcaggatgtaatctctcggtgttcggagtcaatgcctatgactgcattgccggaggtacgggcgccggacacgtcaacaaagcctatacggtcgatttggacgaaggtttgcgcaacgccggattccggcttaacacccgtacggcagatctctatgcaaaatacatgtctttcggtgaggcactgctcgcggagcagaacgccctgcgttatttgggcgaaaagtggtttgtccccgaaacgacgctgacgccggaattcatcgcttcgcgtgcggcggacagcgatgcggccatcgttgccttaggccgcaattcgggtgaatacaacgatcgtcctacatcggatttctacctgacggaagccgaacgggaactgctcgaatcggtctgctcggcgtttcatgccgcgggtaagaaggtggtcgtggtgctcaatatcggcggcgtgatcgaaaccatgtcgtggaaggaacttcccgacgctatcttgttggcctggcagggaggtttggaagccgggaatgccatggctgatgttttgagcggccgcgtatcgccttcgggaaggctgccgatgacttttccggcggattattcggatcatccgtcatcgaagaattttccgctcgactatcgggggcgctgcggcgattgggccgacgacgccccggaacggcacctgcgaaacctgggattcacttgttacgaggaggatatctgggtgggttaccgctatttctcgacccatgctccggaggcggtgtcctatcctttcggctatggtttggggtatacgaccttcgagtggacggatgcggccgtcaggcgttccgggacggattatgcggtaacgctccgtgtaaccaatacaggttcgcgcgccggacgggaggtcgttgaactttatgttgcagccccgcaaggggcgctgccgaagcccgtgcgcgaattgagggcttttgccaaaagccgggaattgcagcccggggagtcgcaggcgctgacccttcgtttcgcggctgccgatctggcctcgttcgacgagcgtatttcggcgtttgtcgtcgattcggggcgctatatggccgaactggggcgttctgccgacgacattgtccagcggctgccttttgtcgccaaagcttccgagcgcaaggtgcatgacgtactgaaaccgcaggagcccctgcgacgactcaaattctgatgcaatgaaaataatagcttgtttgttgatttgtatgggctgcaatgcgctgtttgcagcagtgccgcccgctatccggcccgatgcgaagatcgaaacccggattgaaaagatactcggccgcctgacgcttgaagagaaaatcggccaaatgtgtcagttgaccgtcagcatggtgaccgatatgaatgattccgggcatccgttcatcagcgatgagctgctcgatacggtcatcggacattacaaagtcgggtcgattctcaacgtaccgttcgatgaggcgcagtcccgggaggcatggacgcagattatcggtaggattcagcgtcgttcgctcgactgcctggggattccctgcatttacggtgtcgatcaaatgcacggtgcttcctacacccgcggtgcaaccttttttccgcaggggatcaacatgggtgccgcgctgaactgtgaactgatgcgccgttcgtcggagatttcggcttatgaaacccgtgcctgtgccattccgtggaattttgcgccggtgatggatttgggacgcgatccccgatggtcgaggatgtgggagagttacggagaggatgtttgtgtcaattcccggttggcggcggcttccgtgcgcggtttgcagggcgatgatcccaatcggatcgggatgtatcgggtggctgcttgtttgaagcatttcatggcctacggcgtccccgtgtcgggcaaggaccgaacgccttcgtccgttacgcgcaacgccctgcgcgaaaaatattttgccccctttctcgaatgtatccgggccggggcgctgtcgttgatggtcaactcgtccaacaacgacggtatgccctttcatgccaaccgcgagttgctcacggggtggttgaaggaagaactgaactgggacggggtgatcgttacggattggaatgatatttacaatctatatgagcgggatcatatcgccgagagccgcaaggatgcggttcggatcgctataaatgccgggatcgatatggccatggtccctttggaccgggatttctgcgtctatctccgtgaactggtcgaggaagggctggtttccgaaagacgcatcgatgatgccgtttgtcggattttgcggttgaaaatgcgcatcgggctgttcgaagagccgttcccggacacttcgaagttcgatcgtttcgcgagtgatgaattcgccgccgtggctttgcaagctgccgaagagtcggaggtgctgctcaaaaacgacggaggtctgctaccgctcccgaagtcggcgcgtatcctgctcaccggccccaatgccaatttcatgcgctgtctcaacggcggctggtcttacacctggcagggtgagcgttgcgatgagtttgcagatcgttacaatacgatttacgaggccttggcgcgtaaattcgatcatgttacctggattccaggcgtagaatacggcaccccctcggagaattggcaggtggagcgtgtgcggggaatcggcgaagcagtctcggcagcggccgatgcagacgtgattgtcgtctgcatcggcgagaactcctattgtgaaactccgggcaacatgaatgatctgaacttgtcgcaaaaccagaaaaaactggtccgcgaactggcgtctacggggaaacccctcgtattggtgttgaacgagggacggccgcgtctgatcggcgatatagagccgttggcgcaggctgtcgtcgatatcctgctgcccggcaattacgggggtgacgcactggccaatctgcttgccggggatgcgaacttcagcgcccggcttccctttacctatccgcgctggcccgatgcgttggccacctatgactacaaaccctgtcagaaaaggggtacgatggagggcgaatacaactacgatgccgtgatggacgtgcaatggcctttctgccacggattgagttacactacattcgaatacggaaatctgcgggctaaccttacggaatttcgggccggagatacgctttcgttcacggtcgatatctccaatacaggcgactgcgcgggcaaggaggccgtattgctctggtcgagcgatttggtggcaagcctgacgcctgacgtgatccggctgcgcaatttcgagaagatctcccttgaaccgggcgaaacccgtacggtgacgctttcgataccggcatccgatctggcgtttgtcggttatgacggtcgctggcggctcgaaaagggcgatttccggatccgtatgggtacggagaccctgttcgtccgatgcgtggaaacccgggtgtgggacacccctaacattccctgaaaccgttctaaaacataccgatatgaaaaatgttttttttgccgtcatggcgcttgctgtttcatttacggaaacccgagcggcggattctcccgcgatcgttcccatgcctcagcacatcgcttacgcaactggcgaaggagcggtgctctccgccggatcgcggatcgctgtacccggcggggctaaagcgttgcggagtgtcgcggaactctttgtgcgggatatttgccgggaacatggacttcggctgaaagtttccggaatttccgaaagcggcatcgtactcgggatcgatccggcgctcagggcggaggcctattcgctcgacatcggccaagggcgtgtcgccgtgacgggcggttccccttcgggactcttctacggattgcagagcttgcgtcaacttatctcgcagtatggcatgcgacttccggcagtgcatgtggaggatgaaccttgtttcgcttatcgcggcgccatgctcgactgctgccgtcatttcttcacggttgacgagatcaaaacgttcatcgacatattggcgctccacaaactcaaccgttttcactggcatctgaccgacgaccagggatggcgtatcgagatcaggcattatcccggattgacgaaagaggggtcacggcgtgccgaaacagtccttggacgcaatacgaatatctacgacggcataccttcgggaggatactatacgcagcgacaaattcgtgacgtcgtagcctatgcggccgaacggttcattacggtcatccctgaaatcgaaatgccgggacatgcctcggcggcactggcggcctatccctggctggggtgtgccggtgaggggtatatggtacggacgcgatggggcgtattcccggaagtttattgcgcgggcaaggattcgacgttcgaattcatggagaacgtgcttgcagaggtgtgtgaactgtttccctcggaatatatccatatcggcggggatgagtgtcccaaacagagttggacgagctgtcccgcctgtcagcagcgtatccgtaatgagcggttagagcatgaaaacgaattgcagagttattttgtccatcggattgaaaaatggctcaacgcccgggggcgcaatctgatcgggtgggacgaaatactcgaaggagggatttcaaagacggctacgattatgtcgtggcgcggtgccgatggcggcgttgccgctgccaaggccgggaatcaggtgatcatgacccccaacacgcattgttatctcgattattttcagacgcaggagccggagcgcctcgaaccactcggtatcggcggttacgtgccggttcgtaaggtttattcgttcgatccctatgaccgtctttcttcagcggaacaatcgtgtattcagggagtacaagggaatatatggacggaatatatcgcttcttttgcccatgcacagcatatggccttgccgcggctggccgcattagcggaggtgggatgggcctgcgaccgccgcgatttcggggatttcacccggcgcatgacggtattccggaaactttacgacaaatgcggctatcgctacgcctcctatttcttcgatggaacgggcgaataaatcggtctaccggtgctaaatatactgcgatgatgaacccgaacagacgacttttatctttggacaccctgcggggggtcgatatgttctttattatgggcttttcagggctcgtgacctcgttgtgcgcactgtggcccggatcttttaccgatatgcttgcgtcgcagatgcagcatgcggcgtggaatggactaacgattcaagacacgatctttcctctgtttctttttatcgcaggcgtggcgttccccttctcgctggccaaacagcgtgcacgcggattcggcagaaaacggattctggaccggattttccgccgcggactgattcttgccctgttgggaatggtttataacgggttgttcgagctcaatttctcctcgttgcgcatagcaagcgtgctgggacggatcggcttggcctggatgttcgccgcactgctctgcgtgtattgcagcgtgagaactcggatagctgttgccgggattatcctaataggctattcactgctgctcggcctggtcgtagcccccgatgctccggtcggtgccgatccgctttcggtggaggggtgtctggccggatggattgaccgacagtaccttcccggacacatcctttacggggcattcgatccggaagggatattgagcaccctgccggcagtcgtatcggctctattcggaatgttcaccggcgaatttttgctcgatggccggagagggctctctggctcttggaaagcgttctatatggccgtcgccgcactggcgatcacgacggcgggcttgtgctggaatcttatcatgccggtcaacaagaatttatggagcagttcgttcacttgcgtggtctccggttattcgctggggatgaccgccttgttttattacctgattgacgtgtgcgggtacaaacgatggacgttcgttttccgggttatcggattgaattccattacgatttatatggcgcagcggattattccactgcgttatgcgtccgattttttcgtcggcggacttgcttctaaatgcagtgaaacagtaggggcggtgatctacgatataggttatatcgtgctctgctggctgtttctctatttcttgtatcgaaaaaacactttccttaaggtatgaccggcaaatagcccgaaaattacaataacctcatttaaataaatttagcatgaaccaaactttgaagttctcgttccggaacttgtttttgtcctgtgtgtgcttgcttctgtttgcatgcggcgggaatccggagataatttctcccgacgggcgcacacgcctttcgttcgtgacgggcgccgacggctgcatggcctataccgtcgaacgcgacggcaaacctttgatccttccttctgccttgggcctcgtggtgcaagaacggaacctcgccggcggcttttcggtacgggagattgtgaaaaggtccgtggacgaaacatggacgcagccgtggggcgaaaataaaatcctgcgcgattgccacaacgaaatgacggcggtattgaaaaacgacgacggcgtgttgctgacgcttcgtttccgggcttttgacgacggtgtggcattccgctatgaatgggaggtgccggacctcgattcgctgaccgtcaccgatgaactgaccgaattccgcttcgccgaagacggcgtgtcgtggtcgattcctggaaatttcaacacctatgaattgttgtatcgcgaactgccggtttcggccgtcgaaaacgccaatacgcctttcacattccgtgtggacggcacatacggttcgattcacgaagcggcgctgtacgatttccccgaaatgaatctctaccggaccgattcgctggccttcaaagccgagttggctccgctgcctgacggtataaaggctcgtattccctcgaaattcatgacggcgtggcggacgatccaagtgggagacaaagcggtggacctgatcaactcgtcgctgatccttaacctgaacgagccttcgaagattgctgacacttcgtggatcaaaccgcagaaatatatcggcgtatggtggggactgcatctcggcacccatacatggacaatgggaccccggcatggagcgacgacggagaatgctctgcgtcatattgacttcgcagcggcgaacaatattcagggagtgttgttcgaagggtggaacgaaggctgggagaactggggtaaaacgcagcacttcgattatgtgaagccctatgcagatttcgatctcgaccgcattgccgcgtatgcccgggagaagaacatcgagttgtggatgcacaatgaaacgggtggtaatattcctgaatatgaagcggctctggaaacggctatgcagcgctatgccggattgggtgtgcatgccgtcaaaacgggatatgccggaggcttcagggacggccagctccaccactcgcagtatggcgtgcggcactaccagcgtgtcgtcgagacggcggcccgttatgggatcgtcatcgatgcccacgagccgatcaaggatacgggcattcgccgcacgtggcccaatatgatgacccgggagggggcacgcggcatggagtggaacgcatggtcggaagggaactccgcggagtatctctgtacgctgcctttcgtacggctcctgagcggtccgatggattatacgccgggggtattcgatcttgattactcgcgcgtccggggccgggaaaccggaatgcaggagtggaacggcgacaacaattcgtgttgtatcaagactacgctggcacgtcagattgccaactgggtgattatttattctccgcttcagatggcgtccgatctgatcgaaaactacgagggacatccggctttccaattcttccgggatttcgatgccgactgtgactggtccgaagcattgcagggtgaacccggcgaatatattgtcgtcgtacgccgtgcggatgacagtttcttcctgggcgccggcacgaacgatgagccccggacattgacccagaaactcggcttcctgaagtccggtatgacttatactgcaacgatctatgccgacgctccggattctgcggagaatcccgaaaactatcgcatcgaaaaacggaccgtgacttctgccgatatgctcgaaattgcaatgactgcccgtggcgggcaggccgtgacgtttgttcccgtaaatgaatagaaccatgatgagacttgttttttgggtcgtgctgctgtcggtcgttccgctgtcggtcgatgcccgcagcgaagggtgggtaattaccgcacgagataccacggctgattattttgccgtcgccatggccaacggagaaattggcgtagccgtgggtcgggagccttttgccctcggttctgtgattctgggagggagttatgagccggggttcggagatgatgtgagtcgtattctggaagggatcaatccgctggggttgacaatggctgtcgatggtcatcggttcgatccgtcggaggtccgtccacagcatcagtcggtcgatatgcggcgtgcagtgcacacgacccgtttttcaacggacggtgtgacggtcgtctatcgtatacgggccttgcggaacatgccttacgctcttatgacagaagtggaagtgacggcggaacgcgatgcagaggttcttttttcaaacggtcataccgttcccggagagttcgccgacaccctgcgggagtcgcgcacggtcggatgtgaggacggcagccgtattgccgtacagcgcacttccggcagttacaaccgcggccgcgaccatattgtggcttcgtcgacttttctttgcggtgaagggtgcgaagcggtctcaccggaaagcgtgaggattgttctgcgcaagggcggccgggcgtcgttctcccttgtgggaacaatctgtactacagccgctttcgccgacccgtggaatgaatcggaaaggcaggctatttatgcagcccgggagggagcggcgcaactcgttgcggcacacgaacggaaatgggcggagttgtggcagggcgatatcgagatcgaaggcgatcccacggcacagttggatgtgcgtttcgccttgttcaacctttacggctctatccgtgaaggcagtcgccggagtattccgccgatgggcctttcggcccggggcttttacaacggtcatatcttctgggattctgagatctggatgtatccggcgctgctggtgctccggccctgcctggcgcgccagatgctcgattaccgaaccgacggactcgatgcggcccgtcgtcgggcctacgcccacggctatcggggcgcgatgttcccctgggaaggggatgaccggggcgaggaggctacgccgacctttgccctcaccggtccgctcgaacatcatattacagccgatatcgccatcgccagctggaactattactgtgtgacgcaggaccgggagtggctgcgccgcgagggtttcccgctgatgcgcgaggctgcacgtttctggtgcgatcgcgttacggcgaatgccgacggcagctactcgatccgcaatgtgatcggagccaacgaatacgccgtcggcgtcacggacaatgcctttaccaacggcgcggcccgccgggcactggagtacgcttcggctgcggcggagctttgcggcgagcgtcccgatccgcagtggagtgcagtagccgcgggccttcgcatcccgcacttcgccgacggaacgacgcgcgagcatgccggctacgacggcgagatgatcaaacaggccgatgccaacctgctgggctatccgctgggcatcgtgaccggacgcgaagctcagttgcgcgatctggaatactacgagcgccgaatcgatccgcgtaacggtccggcgatgagttactcggtttttgcgattcagtatgcccggctcggaatggccgaaaaagcctgcgaaatgttccgtcgctcctacttgcccaacctgcggccgccgttcggggtgtttgccgaaacggccaccagcggcaatccctatttcatgacgggtgcgggcggcatgttgcaggccgtgctgttcggattcggcgggctggagattacggcggacggtctcgtgcagcgcccgtctgtcctgccgccgcaatggaagaatctgagaatcaaaataaatggtaaaatctatcaggcaacgaaccaataaatattccgatgaaaaagacaatgctttttttgctgcttgcgttctgtttctcgaactcggtccaggccggtcaggatgcagtatctatcaaactgatttctttcaatatgcgtaccagttgggggcgcgacggcgacaacagttggccgaaccgtcgtcacgccacggcgcaaatgctccggcaggaggctcccgatgtgatgggcgtgcaggaagccatgcaagaccagttgtattacatcgacaccgaatgtccccggtatgcccgtgtcggcgaagatcgtgacggcggggccgaaggcggcgaaacgatggcggtgttctacctccgcgaccggttcgaactgctggacagcggcaccttctggatcagcgagactcccgacaacgtgtcgcgcggatgggatgccgcctgcaaccgcacggtaacatgggtcgaattgcgcgacaagagttcgggcaaagagtttttctatttcaacactcacctcgaccaccaagggaaaattgcccgtgaggagggcgtgaaactgatcgtgacgaagattcgacagattgccggtaagaaagcggcggttatcttgggcggagaccttaatacatccattgacaatccgcatctcaagccgttgaccagactgatggcttcggcacgcgatacagcggcggaaaccgatcaaaagggaacattcaatggtttcggatcggctccggacacgattattctcgatcatcttttctaccgcggcaggatgaaatgtcgaaagttcgtcaccctcgacggcgattacggggcgccttacatttcggatcactatccgatagcaatggtttttacgctctgaaagcgacgaggccgattcgtcgaaccggcctcgtcgtaccgtccggaatttgaactccgttatcggagagcctggatcagtccggttcgagcgtccggtatttcatcgagcggatagtaccggtggatgatcgttcgatccttgatgacaataatccgtactcccgaaggagcgtctcccaacggtcggcccacggcactcgtggttatcattccgatgttgtcgtacgatgtctccgcgttgtcgtgcaaatgtcccgtaaagacggtttgcacaccggtttcccggaacagttcgaaatatctccggcgtttttccggcgaaatggtcgaatagccgtccggttcgtcgatttgccggagaaagaacgggtggtgtgcgaagacaagagatgtccggctgggccttttctttttgagcgaacgggccagccaccggaactgattctcttctttcgaggggtcccgggtttcgtctttcaggtaatccgagttgattccggtcagtaggatcccgttcacacgcacacagaagcggtcgattccgaggtgtttcgtgtagggttccacatcgacggaaccctcttccagccggacgtcgtggttgcccgggagataaagggtcttgatgcggggatttatttctgcgacgatccgcaggaattccgtccattggctctcgtccgctgcattgtgcacgtaatcgccggtgaagacgacgacatcggggcggagcctgtttattgcttcgacggtttttgtgagggtgcgggtttcataggccatgtcgcggttgtcggcatagaaccccatctgggggtccgaaacctgcatgatgatcgtgaccggagatttttcccttgcggatgtgagtgcggccgtcagacagcaaagagttgttaaaatgatctttttcattggattatagatgaatgcatagccaaaaataacgaatgggttgccgaaatccaaaaaaaaacgaaggaatcccactttattttccttacggtgtttttccggtaaaatttcgaccttttttctaaataagagaagaattttgtatcggcatttcaaccgaaactactttatctgaaaattgtaaaatgaaacatgctcatgacacacgtttacgacattacttcttatcccgttctctatttgtagtcgggtcccatctctacgaatcgctaatgtttgatcccagaaaatcatgaaatgtattaagattgataatatgttgcggactgcgcggttgattatgctcgccgtgttgtccggaggtattttcgcggttccttgcggaatatatgcacagtctgctccccgaacggtttccggtactgtcaccgatgcggccaccggagaaccgctgatcggagccaccgtacaggtaaaaggtgtgaccatcggtactacgacggacctgaacggaatgttttcgatcaacctgccggcaaaccggaaaacactgcttttctcctatgtcgggtatgaagcccaggagattgcggttggccgtgagaattatctcaacgtggcgttgaaacaggacgccaatgcgttggacgaagttgtggtggtgggttacggccagcaaaagaaaggcatgctggtgagctcggtacagtccatcgctcccgcggaactgcggatgccttcgtcgagtttgtcgaccgggtttgccggacgcctggccggtgtgatcgccgtgcagcgcaatggacagcccggtgccgaccaggcggatttctggatacgcggtatctccacgttcggttccgcgaccaagccgttgatcatccttgacggtgtggctatcgacgcgaatgaactgaacgggctggacccggagattatcgagagtttttcggtgctcaaggatgctacggcgaccgctctctatggttcgcggggagccaacggcgtgatgatcgttacgacgaagaacggtaagaatctggataagccggtcattaattttcgcttcgagacggctctttcgactccgacgagccgcccggaaacggtcgatgcggtgacctacatgcagatgtacaacgagtcggttctgacgcgcggtacggggcagattccttatacgcaggcgaagatcgacggtacgcgggccggcagcaacaaatatatctatccggatgtggattggtacgatgagatgtttaaaaatttggcagtcaacgaaaactttaacttcaatatccgcggcggcagttcgagggtcgattacttcatgagcgccaccgtccgtcacgaggaaggtatgttgaagaacctgagccgggattacttctcctataacaacaattactcggtttggcgttacgctttccagaacaatgtcaacgtcaatcttacgaagtctaccaaagtgtcgctgaaaatcaacacccagctccgggatacgcacgggccggtgaaaagcagcgaaaacattttcggaatgatcatgaacggcaatcccgccgatatgccgataacctttcccgacgatccgacggtaaaccatatccgttggggcggcaaagccatggtgaagaatcccgtggctgaaatggttaccggctacaaagacgagttccagagcgtattgaacgccaatctgagtctggatcagaatttcgatttcatcaccgaagggctttccgcttcggcgctgatctctttcaagaactattcctatacccagacatcgcgttcggcaggttataattcctacgaaatttcgggtacgcatacgggcgatgacggattggaagactatgatctggagatccgcggcaacgagcaaagtacgacactcgccacctccagcagtactgacggagaccgcaagatatatatccagggaatgatcaactataaccgcagtttcggccgtcatgacgtgagtgctatggtcgtgtataatcaggaggagactgcgctcggaaatcccggtagtctgttcagttctttgcccaagcgtaaacagggccttgcgggccgtctgacctacgggtacgacaaccgttacctcatcgaggccaatttcggatacaacggcagtgagaatttcgccgagggacggcgcttcggctttttcccttcggtggccgtgggatacgtggtcagtcaggagaaattttgggcgcctatcaagaaggccgtctcttatttcaaactccgcggttcgtacggtcttgtgggcaacgacagcgaggagacgcgtttcatgtacatgtcggacctctccctttccggagccggatatacgacgggcgccgacggggagtatacgctgagcggtcccgtttacaaccgtttcgagaataagaagatcacttgggaaaccggagaaaaactcaatgtcggtgtcgatctgcaattttataaccgactgaatgtaatggtcgatctgtttcaggaggtccggagcggtattttcctggaacgcggcacagttccggcttttctcggaacggctacgacaaaagtgtacggcaatctgggtaaggtgagaaatcgcggtttggatctctcgatggattatacccatcagatcggcaaggatttcttcatttctgccaaaggaaccttcaccttcgcccgcaaccgggtgctcgaacaggatgagccggattacctgcagtatcccaatctttcgcgggtcggccgttcggtcaattcgttcctgctttatgaggcgcaacgcctgtttatcgacaataacgaggtgaaatacagtcctgaacaactgctgggcggtgaaatcatggccggcgacatcaaatacgtcaaccagcccgatgcgaacggcaactacgacaacacgatcaattcgaacgaccgtatttatgcagggtatcccgaagtgccggagatcgtctacgggttcgggttttcagcgcagtggaaaggactcgatttctcggtcttcttccagggtacggccaatacgtcgctcgtgatgagcggattccatccgttcggtatcaataacaatgtcaagcgcaacgtcatgcagttcgtcgccgacgattactggagcgaaagcaatccgaatatctatgcggcctatccgcggttgagcgtcgtggaatacggcaacaacacggttgcctcgacctactggctccgcgacgcgtcgttcctgaaactgaaaaacgcggagatcggctatacctacaagaaaatgcgtttctacatcagcggatcgaacctgctgaccttctcgaaattcaagttgtgggaccccgaacagggcggcggatcgggactgaaatatccgacccagcgggttttcaacattggaatccagatgacgttataaaataaattccaaacgaaatcctatgaaatattacacacatattctatccctgattttatctgccgcattcctgtttcaggcgtgcagttatctggacgtagtccccgatgagacgccggacgagaaagacgccttccagaacccgacgatggccgaacgctatctctattcctgttattcgttcctgcccaatccgcgtcacgaaacagcttcgctggacctgatgacggccgacgaggtggtgaccccgtgggaacacgagaccttcgccaacttcccgaagggaaactacaacgccagcgaaccggtgatctcctactggaatacgcttttcggaggtatcaggcggtgctacatcttgctggaaaatatcgacgcggtgcccaacatgacggaggcgaatctccggatttacaaaggagaggcgaaattcctgatcgcttattaccatttcctgcttttgaagaactacggtccgattccgcttatcaagggcgtcatgtccatcgatatggacaaggcggacttccccgagcgggacagttacgacgtatgtgtgcagtggatctctgacctgttcgacgaagcggccgggatgctgccggcagagcagacctccacggcctacggccgggccacgagcgttgctgccaaagcgctgaaatcacggttgtggctctatgccgcttccccgctcttcaacgggaacagcgaatactatgcaaatttcgtcagcaaggtggacgggcgccatctgatcagccagacttattcggaggcaaaatgggaaaaggcggcttccgcagccgaggaggccattgaggtcgctaaggccgcaggttataaactctataccgaaagtccggtggttacgtcgaggttcgcccaaccgaccgatcccgtgcatcgggtgctccgtctgaatttcatggattacaacacttcgaaagaggtgctgtgggccgacacccgaaaagagggtcactatgggttgcaatacaagtccactccctatcgcgtgggtccgtcatcgggcaacggtgtcggcgtgacattgacgatggtcgagatgttctattccaaaaacggacttccgatcgatctcgacccggaatacgactataccgggaggtaccgttacggggagtatcataacgatgtctgcgacggtgtgaccatgaacctgaatatcgatcgtgaaccccgcttctatgcgtgggtggctttccagaacgggtattacgaagtgctccgtcgcgacggagctgacgacaacgcgaacatcgtgcagacgaagttccgcaaaaacgatgttttcggcatcaaggagcgcacgacgaactacacccctacgggatacctcaataagaagggttgttcgccgctctacaacaacattcaggaggatgttgccgctccgcattatccgtggccggtgattcgcatggcagagctgtacctgaatcttgcggaggcttatgccaacttgggacggattgacgaagcggcagcagcgctgaaaccggtccgcgaacgggcgggactggacccggtagacgaggctttcgaaaaggcggggctgacgcttggacgcgacgaaatgatccgcatggcacgtcaggagcggactatcgaactttatctggaggggcaccgcttctgggatgtgcgccgttggaaagagggcgacaagtatttcaacgtccgccccaaaggcatgaattacaacggggagtccgatgccgatttcttccgggtgaccgaagtgatcgtccagcgcaagttcatgactccgatgcattacctgatgccgatacccaaggatgacatcaacaagaacgaacgaaagttcgtccagaatccgggttattgacagaatcacgaatttgaaaaactgcatctatgaaaagcatatataaaatactgttgctctttacctgttcgtgcggcgtttcgtgcggcggggacgatgagccggccatgacggcgctcgccgtacagggaatccgcgccgaggcatttccgggagcgatccgactgacatggaatccggtcgagaacagcgacttcctctataccgaggtttcgtattacgatttcggcacgcagacgacagtctcgaagcagtgcagccgctataccggtaccctctacattgacggactgctgaacagatatgggaagtaccgtttcacatttacggcttacgatgtaaacggaacgcccgggcaacccgtctatatcgaacggcagtgtgaaaaggccgagtcctattatgtggttgttgcggagaatccgatcccgctcgcagccgaccagttggctaccaatgcccaggagccgagcgaaggccccctggaattgcttgtggatggaaatccggatacttttttccagagtttctgggatgagtggacctatcccgaattgaagcctgcgggttaccattacctgactttcgatcttcgcaaggaggtttcagcgtttaaattccaatattggaaccgtaagaaagcgaacggttcgctgcccaagaccgtgaatatttacggcagtccggatggcgaaacgtgggcgttgctggcccaattggataacctgcccggtgatctgggttcctcctacacttcggagttgtttctgccggaagaacctatttcccatgtaaaatacgaggtggtgaaaggaaccgatgtctaccagccctatttttcactcgcagagatcgaattttacgaggtcgtgcgggaattggtcgatcccgaagccgaatgacaatcataattgaaaaagcaacgataaagatgaaaaaactcttgaaatacatattgctgctaatttatgtcgcattgatgcctgcttgtggggaagattccggactggacggcgtatttgcgaataagccttttgccctggtgaccgctgccgacggcgggcggacttccatttcggcggtcatcgacgacggcaagcggacgatccgtctgactttcgacaaaaagcgggatgtggatgccgtggagttgacgttccagttgaatcccgggtatgcgatggtttctccgaaggaaccggagacgacgatggacctgacgcaaccccgaaccgtgacggtcagctcgggagccggggaggtctcctacgaaatctcagcccggaacgaaactccggtcttgtcggcctctttcctgtttcgcgggaaaccgatcgagggagtgattgaccatgagacgaggacggtttcgttcccgatcacgacgatctatgcttcggaatatccggaggagctgttgggtgccgtaccgctggatatcacgctttccgacggctatcggccgacaagcgaaaaggtttcgtacgacctttcgaccggggagagtttttccgtttacaaaggccgcaatacgtacacttatagactggttgccgacattgctccgatatcggtggcagatcatctctctgacttccggtttcggcgcggcgtgaacctcgcttattggatgacggaagccgatcgtgactggttgggctatgtcatgcccgctcaattcccgttgtggaaagagttgggattcgaccatttccgggttcccgtcgacgagctgtgcatctttgaccgggaggggcagtttaacgaaaaggccgtcgggaaattacacgaactttttacatggtgcgagcaaaacggcatgtatgcgattctcgacatgcacacactggctccccgtgaaggctcggacagttaccgggaggaggagttgtacgaccctgcctatcccgaatttcgcacccatttcgtaaatgtttggcgaaaacttgctgcggaattcaaggctcacaatccgaagtgcgtggcctttgaactgctgaacgaaccgcatgacgggacacccgacgcaactggttggaataagctccagaatgaggttctgacggcagtccgagagcaggaccccgaacggatcgtattcgtcccggcaatgggctggcaggactacaactacatcaagtatgcacgggtggccgaggaagatcccaatgcggttgtgtcgttccattattatctcccgatgctgctgtcgcattataagatgctggcgtgggtcggctatcagggagccgtgcaatatccgggggtggtcattcccactcagtcggatgctgacaaatacccgcagtatgcctcttttcacaaaacgacctacaatgccgaccggattatgggtgaaatgtccaatgcggcgtccgacggtcggaatgccggacttgcggtacattgcggcgaattcggatgcagtaaaaacgtcgcggaagcgatgcgtttggcgtggttcacggatatggtggctgccatggaggcaaataatattccatggacgctttgggagtgcctcgacggcggattcggatttgtcgatatggaatatggcatttaccggatcaactgtcctctgctgaaagtgttgaccggcaaggaattgaccgatgcagaggcgaaagctctgctgcaaaagtatggatttaaaaccgaataggaatgttgttgaagattgcacagggcgtattctggatacttgctgtttgcctgatgcccggaacggcctatggggagggccgggacgtcctgcccggaaacgccgcctataaggtcgaggtttttcggggcggaacctgggaggagattttcgtttacaatgcccgggtttccgattatgccggcaatcccgaggcgggatatacccagtatacaatggggttcgccttgtttacggactcgtttcggcagtcgttgaaggtccgcgtgacccgccgtgcggggacgttttcgaaagtggagattcgtccgctctcttacggcatcgtgcccgacgtgcagaccccgaacagcgtcgagttcgaactgggcgatcccgcgcaaaaggtttcggtggagttcgacggcaatcggatggagaacctcttcatcctgcccgacctgcccgacacggcgatcccgatgggtgccaatgtaacttatttcggtcccggggtgcacaatgcgggtgtgatccgtattgcgaatgaaagcggccgtattctctatctcgatgaaggggcggtcgtgctgggacggatcgaggctgaaaatgccgccaaccttacaattcgaggacgaggtgttttctgttcgtcgcaggaggatcacggcgccggccggcggccgcagatggagttccgcaattgcgacaatctgaagatcgagggcatcctgctgcgcgacacgccgaactggacgctcaagatcgtcgggagcacgggcgtgcatatcgacaatatcaaggagatcggctggatcatgaactccgacggcatggatttcatctgctgccgcgatgtgctggtcgaaaacaccttccagcgtaactacgacgataacgtgaccatcaaggctttcaatgccacgcccgaatacatcgcttcccatacgaataccgacggctcctattccgacggggcgatctggatggttgccgggcttcgcgatttcgaggtctgcaactacgagatccgcaactgcgttttctgggccgacaaggcgcacaatatgctcgtaggccccgaggcgcggggcattgcattccggaatatccggttccacgacaacattgtgctggaaaaccgtcaggacgacgggatttatcccggggcaatggcggtgatgatcgccgacgacggcacgttcgaggacattgcgttcgaaaacatcattgtcgaggacatcgacggcggaaaggttttctgcgcgcacttcaccaacgcctgggcgttcgacggactttatggacaatgggcccggaacatcaccctgcgcaacatcgcctataccggtacgcgggcgactccgagctggatcagaggacgcaacgacgcgcagtcgatcgacggagtgacgatcgggaacttcacggtcaacggcacgccggtaaccgacggatcgggcccccatctggagatcaatgaatatgtccgaaacgtaacgttcgaatagacttttgtcatgagaagaatcttaataacctctcttgccctgtgtacggccgcgctgtcagccgcctgctccgactccgcgtgcgattcggacttggttgcgggcggaatggctatggtgcgggccgtaccgcagtccgtgactgcggaggccgcctatgcccaccgtgtctgcctgatccgtgaaggcgttgttgcgcagtccgtctctgcggcatccgccgcggcgctcgcaccgtttcgggtagagccgggaacctatggaatgctggcggttgctgctgcggacgaggataatctgacctttccggcagcggaggggatcgctctgtcggagtacggcgtccggataacggacatgaccgctccgattcccgacctgctgatcgggtgcaacagccgtttcgaagccgtcgccggatcggtttcggctccggtcgggatgaagcgggccgtggctcaccttacggtgactgtcgtggggctggaagcgctctcctgcgaaagtatcacggtctcgattccccggatgtacgaccggatcgcctccgacggaacgcccggaaacagcggggctgaattttccgaaaaggcgatcgtgctggctcggaacagcgcgggacgttatgtcggccaggccgtcgtcctgccgactgacacagcctccgcgacgttggagttccgcttcacgatcaacggaaagaattatgtttccgtgcaggaaacgcgtatcgaggctaatcggaaatacgcgctttcggtcgcggcgaaatttaaggacgataccgacctgaaacttacgcccgtgatcagctatctcccctgggacgctccgacgacgattcccgacgacgggctgcccgccatggacgaccgtccggccaatgacgatttcacggtggagattttccgcaacggatgctgggaagagattttcgtgtacaatgccgaagtttcggactatgccgccaatccggctgcggggtacgtccagcatgacatgggctttgcaatgttcaccgatgcgttcgccgctccgttgaaggtccgtgtgacccgccgtgcggggacgttttcgaaagtggagattcgtccgctttcttacggcatcgtgcccaacgtgcagaccccgaacagcgtcgagttcgaactggacgatcccgcgcaaaaggtttcggtggagttcgacgacaaccggatggagaacctcttcatcctgcccgacctgcccgacacggcgatcccgacgggtgccaacgtaacttatttcggtcccggcattcataatatggggcgcaaggagattctctataaggataatcagacgatctatctcgacgagggagcgctggtctacggcagcatctatgccaagagatgccgcaacttgacgatccgggggcggggcatcctctgttcgtcaaaggagaatcacggtgacggccgccagccgcagatcgaaaccttcgactgcaacggtttcaaggtcgagggcatcctgctgcgcgacacgccgaactggacgctcaagatcgtcggaagcacgggcgtgcatatcgacaacatcaaggagatcggctggatcatgaactccgacggcatggatttcatctgctgccgcaatgtactggtcgagaatacgttccagcgcaactacgacgacaacgtgactatcaaggccttcaacggaaagaccgattacgtcaccgcgcacaccgcctccgacggatcgttcaccgacgcttccatctggacggtctattatctggcgcagaacaagtttgatgtctacgattacgagatccgcaattgtgttttctgggccgacaaggcgcacaacatgctcgtcggtcccgaggcgcggggcattgcattccggaatatccggttccacgacaacatcgtgctggaaaaccgtcagaacgacgggatctatcccggagcgatggcggtgatgatcgccgataacggcacgttcgaggatattgcgttcgaaaacatcattgtcgaggacatcgacggcggaaaggttttctgcgcgcacttcaccaacgcctgggcgttcgacggactttatggacaatgggcccggaacatcaccctgcgcaacatcgcctataccggtacgcgggcgactccgagctggatcagaggacgcagcgacgcgcagtcgatcgacggagtgacgatcgggaacttcacggtcaacggcgcgccggtaaccgacggatcggggcctcatctggagataaacggatacgtccggaacgtgacgttcgaataaccgcctgaaatcaataaaaaaattttattaaccaccttaaacgcataattatgaaaaagtattccatgtacacatttgccgtcgccatgctggccggtatgattctgacgggctgctcctcttcggaggagattccgggaggtactcccgacaacggaccgaaactgaagatcgagacccgctcggcggatgccgccgaggctgcttatgcacaccgggcgattctggtgtcggagggtaacattgcggatgcaaagagcgccgccgatgctgcggctttaggttctttctcggtcgagccgggcagctacaccgtttacgccgtcgcttccagcgacgagacgaatctcacttttacgggtgtcgccgcttcgaatgccgttgccgatgcacgtgtcaaaataaccgacatttcggctcagattcccgaactgttggtcggtaattccgacgtcgttacggtcggtgccgaaggcgcggcggccgcactccagctcaagcgcgtcgtggcatcggtcacggtgacggtcagcggactggagaacgtcgatgccgagagcatcaccctgacgatcggcaacatgtacgatcaggtgagtctcgacggagcgttttccaagagcggagctgcgttcgcatcgaaaagtcttgtactcaccaagaatgccgaaggcaagttcgtcggcaacgctatcgtgatgcctaccgatacggaggcttccaacctctcgctgacttacagcgtcaacggcacggattacaccagcacccctgcgggccggatcgcggccaacgggcagtatgaactggcgacgacggtcgaagccggcagttcctcctcgaaggtcaacctgaactcggcgattacctacgcggcctgggacagcacggtggtgaatctttccgacagctttaccatcgacgagactacccctgacaagcagtggatgggtccgacagcccttccaatcagcggttcagccgctcctggatacgacaatttctgggcgtcgtccgatggaggcgattccggctggggcgagacattctggcagtacaacctttatgacgggaacaaaacggacggaagcaactattggtgtcctgacgaatgggaccgcacggctcccgtctggtatatcgacctcggcgctgccaagcagggcgtgaccatcgactactggaacaaggctggcggtaagggcggtcagaaaatcaagacgatggacatttacgcaagcaatacgcgagccgattacggcggtggcaatgcggattgggtgaagatcatgactttcacctccgacaagaccactccgaccacggacgccggggcgcaggtgacgacgggcaagatcgcattctcggaggatggaagcgtctcctatcagtatgtaaaatgcgtgatgacatctaaggtcaatcctgacggtgcgaccattacggatgtgctcgacgtgaatgtcggcgaggtagaggtttcctactgggagttcaaataattgtcggaggggagttctcctcctgcgatacgctgaatggggatttgcgggagcggactttaacggtccgttcccggcatcgccccgaacggcagtcgtgtgggcctgcggggcctgaagaatcaagtatataatatgaaagccatgatgatgaaaaaacagaatgtcgggaatgcctgcggatgggcgggtcgccttgcacgccttctgttactgcctgcgctcacgctcgttctgctttgctcgtgcgacgaggacaaggcgaaatccgaaagaccggaagagggggatcagctttggaagatcgttcccgttcttgcatccgaaagcgatggcttcgaggggctcggtgagtatggggtgtcgctctaccttttcaacgacatgtcatccgactgctataaataccagcatgccgactcgttcggcgatctcgaacctttcgtggtggaaaaggcggcttattcgcttgtcgcgctgatgatggatcgtgatgttcctcatgttttctatgaggcttcggacgaggccaaaaagaacacaaccgtgaccgtaacggacatgaacgagactattccggatatggtgctcggtacggcgtccgtttcccggaatgtcggcgcgacggttcccgtctccgacctgcaacggctggtcggggccttggatgtccgcctgaccgatgtcccgaatgatgtcacggccgtggaacttaccgtaggcgatctctacgaccgggtcgaccttacggggcagtacgacttttcgacgggggagcctgcttcgaagcggatcgagctgacgaaagagggaaccgttttttcagcccggagtgtgctgatgccttcggacgagacgagggccaatgtgaagatggattttcgggttttccggggcgacgcgtatgaggatttcgtcgtacgtctttccggaagtattccggcagacaaactcacgcggcttgaaggccgtgcggaagagatcttgaagaatgctgaactgacgttgggtttgacctatgctccgtgggatgcgagcataacgatcgaggatcacttccagaccgacgacgacctgaataaggtttggtcctcggcgccgcttcccatcagcggcgcagccgatcccggatatgacaatttctgggcttcgtccgtattcaccgactgggacggttccgtaaaatacgattcgtatctttatgacggtatcatggacgggagcgacgagcacaaggacctctattggggccccgacgcagttggggaggcagaaaaaggcaccgttccgtcgtggtatgtggatttgggaaccggatgtcagggcattacgctcacctactggaacaaattcggaggcaaaggcggccagaagctccgcacgatgaatatctatggaagcaatgctccggaggactatcggggcggcaacgaaagctggacgctgatcacgactttcacttccgaccggacgaaacctacggaagacgccggagccgaggtcacgaccgggcggatcgaattcgacaagggaaatgcgacctaccggtatgtgaaatgcgagatcacctcccgggtgaacgccgacggcaatgtggtcgaggattccgatgtgaatgttgccgaagtgcagataaccgtgtggtcctgtaaataggaatgtttcggcccggcttgacggccgggccgtattttatgtaaaaatcaattggacatgaatgaacgattgttgccgggacgtatccgttcgggctggggagtctctattctttttctttgtttaatggccctttccgggtgctgttcacacgaagcgattcgggtgaatctcattccgcgcccggcggaaatggaggtgctgtccgggtattttcagccgggaaacacgacggtggacgacttcacgaccgtagttgtggacaattcccggatggatgcgctgggacgggagggatacgaacttacggtcgatcgctcgtcggtgagactcacggctgccacccagaccggcattttctatgggaaacggacgctggaacagttgatgaccgacaagggtattccttgcgtaagggtcagcgaccggccccggtttgcctaccggggcatgcacatggatgtatcgcggcatttctttccgaaaagtcaggtgctgaagatgctggacgaaatggcccgctacaaactcaacgtattccatttccatctgaccgataacggtggttggcgcatccggatcgacaaatatccgcggctcaccgccgaaggggcattccgcacgcagcgggattggtatgcatggtgggaccggaacgaccgtcgctatcttcccgagggaactccgggcgcttacggcggatatttcaccaaagaggacatccgtgagatcgtgacctacgccgccgagcggcacattacggtcattcccgagatcgaattcccggcgcattccgacgccgtgttcatcggctatccggagttgtgctgtacgggcaaaccttatacgacgggagaattttgtgtcggcaacgaacaggtatatacttttatggaggatgtgcttaccgaagttatggagcttttcccttcgaaatacatccatatcggaggcgacgaggcccggaaagtcgcctgggcgacctgtccgaaatgccaggccctgatcgagcgggagagacttgacgggatacagggactccaaccctatatgatcgcccgtatccaggattttctcgcttcgaaagggcgggttatggtcggctgggatgaaatactgcacaacgaactgcattccgaaaccttggttatgtcgtatcgtggacagaaaggggctatcgaagccgctaatcggggcaattatgccgtaatgacacccggtgaagtgctctatttcgactggtatcaggccgatccttccactcagccgcgtgccatgtacggatattctcccattaaaaagatgtacgctttcgagccggtgccggctgatccggaatcggcggcccgcaacgagtcgatcatccgggccgaattcgtggaccctgcggccgtggagccgatccgggcggatcgcgccgaccgcatcgtcggtgtgcagggatgtacgtgggctgaatatatcgaagatgaagagcaacaggaatacatgatctttccgcgtctgctggctgtggcagaattggcatggacaccgcaggagaagcgcgaatggtgcgatttcaaagtccggatgaactcccatatcccactgttgcagcaacgggggctaaatacttttacgctgagcgacgaagttgagatcacgactcgcattcgttccggaaatagagcggttgaggtgactctcgactgtgagaaatatcccgcagagattcgctacacgttagacggaaccccgccgacgcccgacgcttcgctttacgaagctccttttaccgtgaccgattcgacggtggtccgggccgccgtatgtcgggatggagtgattcgaagtcctgaacggaaacaattggttactctcgccgcggagatcgacaactattatccgttcgatgtgccggaaatctggaaagaatatttcgattaatcgttccatcgactattgtgcgttatcgccttttctttctgggcggcagactgtgcgcagccttgaaacggagtcggacgtggctgactttgggttgattcgggaaaaggtccgggtggagggaataacagacagcccttttattttcggccttcggatttttcccgtatgccctggcgcggacgaatatgccgttgggtcgctcctgttccgaaagatcgtcttcatttcgcaaacagaaacgacatcgtaattgacgttccggagggggcaatgcccgataaacacaccggtcgataaccgattcgtcatagatcgccccggagatttgctagttttcaaaatcaaagatccccggggcttatcgtacgattcagaagcgatcgatatttatgtgaacggttcaacatcgcatataatcggcttatctatcaggttcaatctatttagagacgggagaaccaaatatttaaagtcatacgctctatattagtgtacaagcgtttgtcaatgtgtttatgttcctcaatattccggaacgataacccatatcctccgagatagttttgttgttcacgatcatttgatggaatataaccattggaggactgtctatttatcatggtgaagtcattctaaataaattatccaatttgaaaaatcgggacattttattaaatttgtattcaataacaggagttgtttgacaagatggaacgcagatgcgaacaaatgcatacgactgtttcctaaccattacctgctatatgcaaatagagtcataactttttaagttacaactctatctaaaaatgaatggataatacgagcagtacgaagccttcgacgagctggaggaggagtacggcgaaatggaagccgaggtcacggagacgctcgcccgctacgtggacgggcatctggatctgttcgccgcggtcgtcggataaccggcccggaatcctgcggaaacagcctctccgcatcgccgttcccggcatatacgaagcgtccgcggaggaatatccggagacattccgctaaaaaaatcggaaaaaaggcggtcggccgtaagggtcggccgcctttttcgtgtcttcgggtaaaaaccgaataccgtcatggacaaacattaccgggacctcctgatccgtgcgctgaagggcacgctggacaccgcatcgcgccgcgaattcgaccggtgggtctcggatgcggacaaccgccgcatctacgaaaacgccctccgcatatgggacgacgtacagcgccgcacctcggcctacaatcccgaccgcgaccggctctgggagcagttgcagtcccgcatcggagtctacggaacgccgcagccgacggagcggcccgcgccaaaacgccgctgggcgccgatacttcgcacggcggcagccgtcgccgcgggcgtcgtcgtcacgctcttcgcggtgcgtcccgacgccgcccccacaccgagcccggcccgacaggagttctgcgccttcggcggcaaatcgctggcacacctgaccgacggttcgaccgtatggctccaaagcggctcgacgcttgcctacgacagctccttcggcgccgaaagccgcaacgtaaaactccgcggagagggatttttcgacatcgccaaagatcccgaacgccctttcacggtcgaagtggaagggctgcgcatacgggttcacggcacgaaattcaacgtgaacacctcgcacgaagaccggaccgtcgccgtatcgctcgttgagggttcggtggccctcgattccggcaacggggagacgcgccggctgcaccccggagaaatagcctgctacgaccccgccacccaagagctgaatatccgcaggggcaacgtcgagctggaatcctgctgggccgcgggcaaactggtcttcgagcggcagtcgttgggcgaaatctgccgctacctctcacgctggtacgacatccggatcgacatctccccggcactcgcccacaactacgcctacacgttcaccattaccgacgaaccgctcgaagcgattctgcgcatcatgagtcgcatcaatccgatcgtctacactttctcggacaaccgctcggtgtacatctccgagatagaataaaaccgcaaacctaccaaacaccaaccaaaccccgaatgcctatgaccgaacagagcagaaccgtacactatccttcccgcggcagcatccgccgccgcaaacatacgctaactttaaacttcaaccatgaaacattttagactattcgcaattcttttgctgctcgtctgcggatggacaacggttgcacacggccagacgcaggagccggcgatcaaccttgagttcaccgacatacctctctcggaagccatatcgcgcatcgagaagagcagcaaatacacgttcttctacgacgccaaacagaccgatctgacccggcgcgtcagcctccgcgccaaacagctgccgatctccgccgccctgcgccagatgctcgccccgacgggtctcaatttcacgatctccgaacgccagatcgccctgatccccgcggcgcgcaaggccccggccggatcgcgcacgatcaccggcacggtcaacgactcccacgagcttcccttggccggcgtcgccgtcacgctggagggcgacaatacccgcggcaccgtttccgagaacaacggcagtttcaccatcaccgttcccgacaccgatgcggtgctcagtttcacctacttgggctacatctccaagaaagtctccgttcccgtctcgcagaacagcctcaaggtattcctcgcagaggacgccgtgaggatggaggacgtcgtagtagtaggttacggcacccagaagaaggtcaatctgacgggagccatcaccacggtggacgacacgcagcttgcaaaccgttcggcgccgtccgtagcccacatgcttcagggtgcggttccgggtctgacgatctcgaccacatcgggccgtccgggcaactcggccgacctgaacatccgcggcatcacctcgatcaacggcggttcgccgctcgtgctgatcgacggcgccgagggcgacctgatgaagctcaaccccaacgacgtggcctcgatttcggtgatcaaggatgcctcggcagccgccatctacggcgcacgcgcggcctacggcgtcgtgctggtgaccaccaaggagggcgacgattcgggaaaaacccgcgtgtcgtacagcggccgctggggctggaacgcccccaccacctcgaccgactacgagacccgcggctactactcggtctacgtcaacgacctgttctggcacgccgacgcaggcaccaactacaccaactacacagagcaggacatgatggagttgtgggcccgccgcaacgacaaggtcgaaaaccccgaacgtccgtgggtgaagatcgaccagcgcgacggccgcgacacatatgtctattacgccaacttcgactggtaccactacctgttcaaggacgaacatcccaacacgagccacagcgtctcgctgtcgggcggcaactcgaaggtcaagtacatgctttcgggcaactactacagcgaagagggactcttccgtcaggaccccgaccgtctgcagcggatcaacttccgttcgaaaatctcgttcgacatcaacaagtggctcaagatcagcaacaacaccagctactacaactaccagtactactaccccggccccaccggagtcaataccgccttctcgctgggcacggtacacggactggcctcgatgatgccctacaaccccgacggcacgagcgtctactacacctcgctgtcgaaatactcgatcatggacggcctgcccacgatcatgaacaagggcggccactacaacaaggacaagaccgacaacatgtcgaccaccacggagctgacgtgggccccggtcaaagggctggagatcaagggtaacttcacctacatgttcaacacccagcacaacctcaaccgtcaggtcaataccgaatactcgcagtatccgggcgaagtgcaaaccctctcgacgggcagccgcttccaagacaagctctacgaaaagaccatgatgcacaactactatcaggccaacgtctacgccacctacgcacacacgtggaacgagaagcacaacttcaaggcgatggccggtttcaactgggagaccaagtatctcaaggacgtatcggccacgggctacaacctgctctccgaaacgctgatggacctcaatctggtgggacagggcgccgacggcaacgagcgcatggaggtcggcggcggccagaacgaatacgccctgatgggtttcttcggccgtctgaactacgactacaaaggcaaatacctcgtggaggtgagcggccgctacgacggcacgtcgcgcttcaagcgcggtcaccgctggggtttcttcccctcgttctcgctcggatggcgcatctcggaagagcctttcttcgagggcatccgcgaaaacttcaacaacctcaaaatcaggcattcgtacggacagctgggtaaccagaacgtaggctactacgactatatccgcaaaatctcgatcggcaaccagaactatctgttcggcggcgacaaacccacgacggccaccatttcggcccccgtggcctcgaacctctcgtgggaaacctcgatccacaacaatctaggcgtagacatgagcttcctgaacaaccggctggctttcagcgccgacttctacatccgcgatacgaaggacatgctgaccgccggcgtcgcactgccgagcgtctacggcgccgattcgcccaagatgaacagcgccgacctgcgcaccaagggttacgagctctcgctcagctggcgcgatgagttccagctcctgcgccggccgttcacctacagcgtgacggtcaccttcaacgactacgtgaccaacatcaccaaatacgacaaccccgaccgcacgttcgccaagtcctactacgaaggcatgcgctggggtgagatctggggctaccgcatcggcggactcttcgccacggacgccgaggctgccggctacgccgtcgatcagacggccgtcaacaaccggatcaacgccgcggccggctcggaacgcggcctgcacgccggcgacctgaagttcctcgatctggacggtgacaacatcatctccatcggcaagaacaccgtagacgatccgggcgaccgggagatcatcggcaacagccagccgcggttccactacggcactacgctgagcatgtcgtgggcgggcatcgacttttcgatcttctttcagggcatcggacgccgccactggtatcccaaagccaatacgatcgccttctggggtccctacgcccgtccgtatgcgagctggattcccaaagacttccacaagatgtactggagcgaagagaatcccgacgcctacttcccccgtccgcgcggctacgtcgccctgtcgggtaccaaccgcgagctgacggccgtcaacgaccgctatatgcagaacatccgctactgccgtctgaagaacctcacgataggctacacgctgcccaagaaatggacccgcaaagtgctgatcgacaaccttcgcgtctacttcacgggagagaacctcgccacatggtcgcccatccgctcggactatatcgaccccgaaatggccgccatgaacgacgagatgcgcacctacccgtggcagaagacctacatgttcggcgtagatgtcacattctaatcaaacaagcagaaccatgaaaaaaatattattgatactggccgcaggctgcaccatggcgctcgtctcctgcgaagagtggctcgacaaatacccgctggcccaaatgtcgcccgaaaccttcttctcgaacgaaaacgagctgcaggctttcagcaacaaattctacacggccttcccgtccgacgggctctacaacgagtactgggacaacatcattcacaacgacctgcctcaggagatgcgcggcggccgcacgatccccgcgtcgggcggcggctggacatggaccagcctgcgcgacatcaacacgctgctcgaatactcggtcaactgcaaggacctcgacgtccgtaaccgctacgacgcgctggcccgtttcttccgcgcctatttctacttcgaaaagatcaagcggttcggcgacgtgccatggtactcgaaaccgatcggctcggccgatcctgagctcaagcgtccgcgcgattcgcgtgaatacgtcatgcagcgcatgatcgaggacatcgatttcgccatccgctacctgcctaccaaacacgacctctaccgtatcacgaaatggacggcactggccctgaaatcgcgtttctgtctcttcgaaggcacgttccgcaaataccacggcatcgaccttccggagaacgactggaaatactacctcgacctgtcggcgaaggcatccgaagagttcatcaccaacagcggctacggactctacacatcgggcggcacgcagaccgcctaccgcgacctgttcgtgtcggaagacgcccagcagatcgaggtcgtcctcgcccgcgattacaacaaggggctaagcgtattccacaacagcaccttctactcgctgaacacctcctacgggcgtccgggcctgacgcgcaagatcgtcgccagctatctgatggccgacggcacgcgcttcacggacaaggcgggctgggaaacgatggagttccgggacgagtgccagaaccgcgatccgcgtctggcgcagtcgatccgcacgccgggttacacgcgcatcaactccaccaaggtcgaagtgccgagcctttcgacctgcatgacgggctaccagcccatcaagttcgtcgcgcccgccgatttcggttccgacggttacaacctctcgtacaccgacctgccgatcatccgcacggccgagatctatctcaactacgccgaagccaaagccgagctgggcacgctgacgcaggacgacatcgacctgacgatcaagaagctgcgcgaccgagctggcatgcccaatctggacatggcccaagccaacgccaaccccgacccgtacctttcggcccctgagacaggctaccccaacgtgacgggttcgaacaaaggcgtactgctcgaaatccgccgcgaacgcaccatcgaactgcttcaggagggccaccgttactacgacctcatccgctggaaagagggcaagaccttcacgcagccgctgctgggcctctacatcccctccaagggcgaatacgacctcgacggcgacggcacgcccgacatctatctcaagaccaagggagagacgccctcgaccaaagccccgctcatcatggagatcgatcaggacatcttcctctcggaaggcgaccacggctacatctcgccccacaagaagaatccgggcgagtggaacgaggcccgcgactactactacccgattccgaccgacgaccgctcgctgaccggcggcgccctgacgcaaaaccccggctggaacgacgggctcgacttttaattcccaatactaacttcaaaaacgaacgaaacgatgaacagactgaaaaaatatcttaccatcatgctgctgctcggcctgacctgcccggcaacggcctgcaacagcagctcctcctccgaagacgaagttccgccccatctgaaacccgcccccccggaggaaccgggtcgggactactaccccaaggccgacggcgcgacgcgtctggtgacctacaacgtcggcgtcttcaccaagtacatcagcgacggcagctaccagatgatcgccgacatgatgaccgagggcaaggccgatctggtgggcatcagcgaactggacagctgcacggtccgcaccggccgggtcttccagctcaagaaattcgccggactgatgggcaaggagtggagttacgaatattcgcgggcgatggcctatcagggcggagcctacggcgacggaatcgccagccgtgaaaaacccgtccggacctttgccgctccgctgccgaagggcgacggcgccgaaccccgcgtgatggtcgtcatggagttcgagaaatacgtcttcgccaccacccacctcgaccatgtgtccgcgctggctcaggcaggacaggtagacgagatcaacaaggtcatcgaacgcgaattcggcggctcgaagaaacccgtcttcctcggcggcgacttcaatgtccgtcccgattcgcccaccatctccaaactgaagacgggctggacggtcctcacgccccacggcgcgagcgacttcacccactcctcgcaggcgccgaacaaatgtatcgactacatcctgctttggaacggcaacggcgcgaagtgcaacgtggtcggcaccaagatcatgctcgacttcaacaaaggcgacatcaagcgggcctcggaccatattcccgtgctggtcgatgtcaaattctaatgctgagacgaacccttaaacgcaaacgattatgaaacgatatgcaaacatacgtcttctggccgccgtcgccctgctcgtcgcaacggcgggctgcaaggacgacgaaggtccggcgctcaagcagcctgccctgctgagcattcaggacgccgcggccgacgccgaagtgattacggtggaaagccccaagaagcagaccctcaacatccgcgtggaggccgagcagatcagcggcaactacataaccgtcgtgttcaagatcgaccccgaactggtcgagacctataacgcggcgcacggtacctcgtacaagctctgcccctcggaggcctacgcattctcgaccaccgaagtcatgctgccccgctacaacacggtctcctcgacgatgaaagtcgagctgttcagcgagcgcatgcccgacgaggagccgtacctgctcccgatcgccatcgattcgatcaagggcgacccgcgggcgacggtctcgccgacgggcggcgtccgctacatcctcttcaacaagttcgtcaagccgggaccgcccgcacccgtgctgctcgaccgcagcggctggaaggtgctcgccgcccccaaggccaaacccaactacgaagtggagaagatgttcgacgaagacatcaacaccttcggctactgcaacgccgacgaggagcaggccaatccgccctacgacttcgtcatcgatctgggcaaagaggtgaccgtacgcggcttccagttcaatcagcgctacatgactaccggcaaaccggaagccggcgcgcgctacggcatcgcccacttggaggtctggaccgcgaaggagatcaccggcgacggcctcggcgcagcgaacgacgccaactggacctacacccagacataccgcgactacaggaccgatcccgactcgccgctggatccgatgggtgtggtcatcagtccgatgctcgacgactaccagcatgcgcgttacgtccggctgcgcattcacgccagctatacgaacaagacctataatccgaccttccggggatggtgcatcgcagaactgaatgtctggggcaacaacgaactgctcgaataatacgtatgaacctgcaaagggacctgccgaaacacttcagcaggcccctttttttaacgcagtcccgatttcgggcgtcccgcattccgcaggataacaggaacgaaagaatgccgaaacgaaaaattcatacgttccgcgtccgttttgtccccgaaaatgcctatctttattagtctgaatttcctttagcgatacgatgaggtcggaaaacgaacacgacatggttttatggaaacgcatcagccgagggggggggaaccgccgcctttcgggagttgttcgaccgttattacgccccgctttgcaggttcgcggcctactggctccgtgaccgcacctctgccgaagagatcgtattggacacctttacgcacatctggcagcatgccggggaactccgcatctcgacttccgtccgggcctatctgttccgcgccgtgcgcaaccgcgcgctcaaccggcttcgcgacaaacgcaccgacggcatccccatcgagggacctgagccgctcttcacgaacccggaagcattgcagctcgaagccgacgaaatgatgctgctggtcgccgaagccgtctcgcaactgcccgaccgctgccgcgaagtattccgcaaaagccgcgaagaggggctttccaacgccgcgatcgccgaccagatgcggatttcggtcaagaccgtcgaagcgcagatcaccaaagccctgcgacgcatccgcgaaacgctgctgcgcaggtgatcttctccccggactccccggagactttccgcccccgccgaacgaccgtctgatgaccgccgaagaccggccggcagccgcatccggcagccgcgctttctccctcagcctcgctcccagcgtcagcgcatcagcaccgacgagtcgccgtaactcaggaaacggaagccgtgtccgagggcgtattcgtaaatccgcttccagtccccgccgacgaaagccgacaccagtagcagcagcgtcgatttgggctggtggaagttggtgacgatattgcgcacgatgcggaactcgtaccccagcggcgtaatcatgatctgcgtcgccgccttgatgcgttccagccccttttcatccatgtatttcagcagagtctccagcgcctcgcgcccggaaaactccgccggcacgtcgtacagctcccactgaccgacgacccgctccgcatcgggcgttccggccgtacgtatgcgccacgccagcgccgtgagcgattcgagcgtccgcaccgaggtcgtgccgacggccgtgatccgcccccacttctccagcaggcgggctaccgccgcacgccgcacctcgaaatgctcggtgtgcatcggatgccgcgcggcatcgtcgtccttgacgggcagaaaggtcccggccccgacatgcagcgtcacctcctcgaacccgaagccgcgcgccttcatcccctcgatcagttcgggcgtgaagtgcagccccgccgtcggcgcggccaccgatccttcgaatttggaatagacggtctggtagcgcgtatagtcgatctcctcgctttcgcggttcaggtagggcggaatcggaatccgtccgaggtattcgagcagctgcccgaacgtcatcgccgccgaccactcgaaacgcacggtatgctcgcggccgcggttctcgacgagccacgcccgcagatgctccgggcggccttcgtgctcgaagttgatctccacatacccctctttccatttcttgaggttgcccacgatgcacgaccattcacaccgcccgacgacggcgaacgcccgttcgtaatcggccggatcgtgcggttcgagacagaacacctcgatgcgggcgcccgaaggcttgtgcatgatgatccgcgcgcgaatcaccttcgtattgttgaacaccagcagctggccttcgggcagcacgtcgccgatgtcggcgaaatgcgcttcgccgatctccccgccgcggtaaaccagcagtttcgaggcgctgcgctcggccagcgggaacttggcgatccgcccgtcgggcaggtcgtaatcgaattcgtttatgtctatatgccgttcactcatgggcacaaatgtacgcttttttcgcttccgttgcacacgctccggccgataatcgcccatataccatatcccacaggccctctcggtcaaaaaagccgcccggtctcggaccgggcggcttcccctcaaaaactattcaaagcccacctctatttggaataaacataaatctcggagctgagaggcgccgacccatacatatgccaaattatataacgagcggttatcggcgcgataaacgaaacatactgcgttccggcaggcgtcatcgacaagccctcttcaggcgttacgagtttccacccggccccgtcatcgctagtataaacagcacaagaactcatcgcataagccgcaccgtaagcactgaacgtctccaatccggtaacagtctttgtagcgcccatgtcgatctttacaccgagatggggagtattgaaccatatataatctccggtattcccattgatcaatttaggttgatgggctccccagtctgcattattatcatccacattggtagcataaaccgaccaaccgctgtaatccgcaatccggctgcccgaaggtttcacgccggcctgtatatccatggatttggctttgtttatctgaacggacagctccttctgtttcgaagaaatacgcaattgtccggaaacaggctgcaccgatccgatcccgaccgtcactttgtaggtggcagcctcctgcggaacaaaactccaatccgtcctgagatccatcgtatctctggctgccaactccccggcaggaatcacgacggcaccgccttcgcggaaagtaacgatctcctccggcatatcgccttcgatcgtataagcgaacttcacggcgacatccgacttccatggtttggcaagacaaaccgcaaacggcatcgagacctccgtatcgcctgcaattcccagagacgaatgcgtctgattgaactccaaagagccgacaccgagcttcagacgttccaaataaacatagtcggccgtccattcgtctgttgcagactcatcgtcgtcgcatgcgacaaaacaacccgcaaccgcagaaacgagaactccggccaaaagatatttcaattttttcatcataatgtaatcgtatttaacaaacaatttgaatgaaccgcatggcggcaggcacgcaccgggcgcgcctgcgccataattacgggattaaggccacggcgtttccgtatcggtggacttgatgccggcaacccacgtcggggtcttggacgtcttcagcgtatgcccgttgcccgtgcagtcctcgaacgtattgccctcgccttcgttgaagcgccagtaagcctccaagccctgcgatttggcgctggtcgtggtcatgttgttctgcacctgcgcttccgtacggcataccgaccagatacgcgcctcggacatcagtatcttacatccgctccaccacgaatcgccggttccgtgtccgccgccggcatcgccgccgaaccagttggccgatccgaagttgggatcgcacacgccctccttgcttccggcaaaagtaccgttgacatagagggtcaccttggttccgtcataggtcagcgccagatgttgccatttgttgggcgtgaacgacaacgacggattgagataccagccgtcgccttggaactgcaccagcgaatgggccttatggtccgaagtgtcgttctgcgggtcctcgaagcgcagcagcaccgaaccgccgttggtaaatacggcacggttgcggttggccgtattgctcacttggaaacgcacctcgaccgtaaactgcggaagcgtcaaggggaaaccgtcggcggcaagtcccgcgccgccgacgaacatcgggagcgacgagacgacgatcgcttcggtcgtaatcacataggtcgaggtcaccgaggtcaccggaaccgacccgtcggcgctgacaagacgcagcggcagggcatagctctcgccgacatactccttgggcagcggcttgatatggatcttggttgcaggagcgctgaattctccggccttgatcgtcacttcggagtccatctcgtagacctcttcgggcagtacgagaaaactcgaagcctgcttctggttgtaacggtccagcacctcggaatcgaccacgaatttcagctttacgtctttcgttgcggcctcgctcaggcaggccgtgatttcggcgtcggcgcccagttccgtaatggtcactttcgtgcttttattcgacgcgctctcgctgacgaaggcgtgcactccgagcgtatcgtaatcggcatcgttgcaggccgagaatcccgaaacgagcgccgcgagaccgagaactgctgttttaatgctgtttttcatctttttcttgcttttggttgttcggactaattgactgcggggttctgcgcctgaattccggttcgcatccatttgtaggagggtttgttcaccgcctcgttgctgaaccggtaaccgccgaaaccgcctttgcggaagccgttgacgggctgccatctggccattcccagcaacgacgggcactcggccttgtcgagtctggttccgttgcgaagcgtccagtaataaccgccgttcaatgcgtcgatggcgctctccatgttttccgtgacgatgaagcgcttggtgatctcctcctcggacatgtattcgccgaagttattgattatctgcctcaggcgagagtccatattcgattcgctctgtccggcattgggcgacggagtgccgccggaaaccgaataggcctgtccgatgaaatagtcgaaataagtcgccgcgctcacaggaaccttccagagttcgccgtcgataacgagcattttacccgaattggactgagggccgaggtgcttgcacaaaatatcgaggaaccatctcacataagtatcgttttcatcgagtttgcccacaactccatcgacattcggttcgaaatcgatatccagaccgtcgtagttgtacttgtaaatggtatccgcgatagcctgcgcatatttctccatcgaggtcttgatggccgcttcatcgtcgtccacccagccccagaacgcttcgcgggtcgcttcatcgacatcatattcggcaggagtgaaccccttgccgacatactggataaaggtacacatcagcactttggtccctttcttctgctgcaccatgcggagatcttcgatcttgccctgcgaaaggttgctcgaattgtcccacaacgagaccatatccatactgtcgggaagtcccatcagcatactggccgtcagaacggcaggatcgccccagccgctgaaccacccgaacgaaatcgagtgatccgtctttttccactcgcgcagagcttggtagtaggattcggggcgcgaggtctcggtattgccgtaatcgaccttcttttcggcttcgacctccgtccagtcgctgcagttggtaaacgcagtcgcgaaaagcagcgccgccgccaatgcccatatatttttctttatgttcataatgtatgctttcgtttaggtttcgacactattttttcttcgtccagaaaagatcgaccgactcgttgtccgtaccgcccagcaatgccaccgccttgtcgtaattgctcttgttgaggttacgctcggtatagggatagcgcagccggcgcaggccgcggaagttgtcggagataacgccgccgctgaggttgtcgatggccggcgccagttcgggatagcccgtacggcggaattcggcccacgcttcgagtcccatcgggaagtttgcgatccatttctgggtgatgatgcgctccagattcttctccgtaccgtccgcgtcgttccacttgatcttgacgtccgtctgacggtcgtagttgtacttcgcgccgcgcggatcgttcagatgtccggcgggaacgagcgtttcatcggccagataggcgtcgatgtcctcgcccgccacgccgttctgctccatcgacagacgcacgccggcttcgtagtaggactgcgccgtaccgcctacggtccactctctgagcgccatctcggcgcgcaggaaattggtctcggcggccacgaaaatcggcagcgacgagccggactgcacgttgggcagcgaataaccgcttacggccgatttttcgaatccggccgtaccggcgcgcatgccgatatagcgggtgttgtcgaaggtcgatttctggaaataggcttcgcagcggggatcgtcgtacccggtcatgtaatcgacgatcgaagcattgattcgcaggtcgccccacgacgccgaagccagctgatagggatttccctgcacgccgggactcatcatggcgttctgggcgttggtctcgatcaggccggcggcatggccgcaggcgctctcggcggcctcgcggtcgtttgagcggatcgccgcacgcaggcagagcgagttggccagacgcgcccaagccgtatagtcgcctgcgaaaatcggatcgttgttagccagcggtttcgacgccggatactcctgcgcataggcgtagagcgtggtcgccgcacccgcgaggtcctcgatgatatgcttgtagacatcctccgccgagtcgtactcgacatagaacgagccgtcggctaccttgctgtaggggatcgggccgtagcagtcggcgacgcgcatcatcacggcggcgcgcaccagacgggccatcgcgtagtagtggcccgacttgctggtcgatttctcgatgtcgaagaagttggcgtaaatatcctcgaacatcgtattgtacggcgtggcgttccatgcgtcggacgcattgaacgtatcgaagttctgaccgccccagcggttcgacagcgtgaaatatccgcccagcgagccgaccatctgatcgaccatctgcgagtcgttctgctgcacgtacatcatggcgtcgagcatggtgggaatcagcacggcggggtctcccttgtaaagggcatagggatcggtgttgtactcgtcgaaattgcccgtacaacccgcaaaaccgcataccgtcaataagaggcaggtaagtttaatgatatttttcatagctttggttcggttagaattgcagtttcacgttaaagccgaaattgcgcgtgctcggctgcatgaagtagtccacgccctgatagtaggcgttgtccgtcgccgccgagatttcggggtcgaacggcgccttgcagtagatcatccagaggttcttggcgacgaatccgaccgtcagtctggctttgttgcggaaccaccgcgccggcagcgtatactgcaggctcagctcctgcaggcgtacgttggtggcgctgtagaggtaataggctccgtaaccgccctcggccgtcgaaatcgccgaatagtacttctggggatcgacggtgccgtagttgatcggaatgccgccgcggtcgcgcgcgtcggccgtggcctgcgacgcgccgtagtagtccagcacgccctgcgtggccgagtaggtcaggccgccgattcgggccgtgaggaccgcaccgagttcgatgcccttgtagccgaagctgttgctccagcccatcgtgtagcggggcgagagctggcccaccttgcggaagtcggtttcggcgatcgagaggttgcccgtcgaaggatcgatctcgatgttgccgttcaggtcgcgcttaagctcgtgattgacgtaaatatcgctcatcgaaccgcccggacgcaggatgacctgcggcgccacgttgctcgcgcccagccagtccttctgaatctcgttgtcggtgatggtctcgcccgtcacggggttcacttcgccggccgccagccgcttgatctcgttgcggttgagcgtaaaggtgtacgaactgctccatgtgaagtcgttccacttgttgttgtagcccagcgccagctcgacgccttggttctgcacgtcgccggcctgtacgaccacttggttgtaacccgacgaagagggcagcggcgcatagatcgtctggtggtaagtgttcgaacggtaataggtcacgtcgaggttgatgtggttgaggaaacgggcgttcaggccgatctcccacgacttggtatcctcaggcttgaggttgtaggccggataggtcgaaggcttgctccagttgtgggtctggttgttgaacgagtaggccggattggagaggtaacgggcgaaagccgacgccaccttcgaatacgacccgcgcaccttgaggaaggtgaaccattcgggcatgttcaccatgttggaaaccacggccgacagacccaccgaaggatagaagaaggacgagtttttggaataggccagctgcgaagcccagtcgttgcggcccgtcaccgtcaggtagagcatcgagcgccaccccacctcgaccgaagcgaagatcgcctgcgtctggtcgtgccacccctcctgcaggggtttgaacttctcctgatagttgaggttgttcatggcgaaatggttggtcagcagcaggtcgcccgccacgccggcctgctcgtagcgctggtcgttgatcgaagcgccgatgttggcgttgagcgtccagtcgtcgccgaaggtcttgtcgatgttgagcatcacgtcgccgtagaaactgcggtcgtgctgcgtctggtcttcgtaaccgccgttcgttccgcagaaggtggtcagcgtcgaggcgtagagcttctgcttgatgcggtattccgaattatcgacccgcacgcggcccgaaacgttcatccagtcggtgatgttccaccgcagcgatgcgttgagcatgtagcggcgcttgctcgtctcgcggttcatgcggttctgaatccaataggggttctgcagcgaatgcgcgccctcgccgtaaggccagtactgcaccatatagccgcgcacggggtcccagcgctcgaaaaggcgaatttcgtcgaagtcgtcgctgcgcgggaagaggtagagcgcgggcagcgggttgtaatacttgccctgcgtcaccatgttttcgtcgtgctggatgataaagctggcgcccaagtccagtacgagcttgtccttggcgaacgaggtggtattgcgggccgtgaagttgtagcggtcgtacgtattttcgggaatgatgcccgccgtattggtcgtcgaagccgagatataggtctggttcttctcgttgcccgtcgataccgacaccgagttgatgatgttggttcccgtgttgaagaacttcttggcgtcgaacgtgctggcatacttctcaccccagttcatcagccccgaactggttccgtagctgttctgcatgtcgggcagccggtagaccttcgaaaaggtcgtactgttgctgacggtcaccaccgtacggtccttgacgccgcgtttggtgttgatgaccaccacgccgttggcggcgtcgctgccgtaaagggccgcagccgaagggccggtcagcatgttgatcgactcgatgtcttcggggttgatatccgcggcgctctccgaaccggcctgtttggcataggtgccgccgtcgccgccgaagctgtggttatacatcggaataccgtcgatcacatagaggacgttgttgcccttctcgatcgacttctcgccgcgcatcaccacgcgcgcactggcgccggggccgctcgcaccgctgttgatctgcacgccggccaccttgccgaccagcgaattcatgaagttggcgtccttgacggtcgtcagctcctcggacttgacctgctgcacgttgtagctcagggccttctcctgacgtttgatgccgagggccgtcactacgacgttctccaccgccacagccgaatcgcggagcgtaatccggaaatcggtgcggctgccgacggtcacatcgaccggctcgtagcccaagtaggtaacggtcaggaccgcattttccgcgggggggggaacttgcagcgagaaggagccgtcggtattggtcgaagctccgacggtcgtacctttgacgatcaccgaagctccgatcaccggcgcgccgtcggcgtcggtcaccacgcccttcacggtcacgggcctgcggtcggccttcgaaagcagaatgtatttgccgtcgaaacggtagaccacgtctgttccgcgcaccatctgcgcgagcgcttccgaaagcgggcgcgcctccacatcgacgctcacgacgctgttgatgtccacgtccttgttcgacaggaacaaataattggtttggttctcgatttcattcatcacacgctccatgctgacgcccgacagacggatcgtcaccgcattattctgagcgtatgaccgtgtggcatagaacgatgcgcacacgacaaaaaagagtgtaaacaggcatttaatttgctgaatacgttttttgttcatacttttgcaattagttagttgttagtaggctgggtagctgattaacggccgaccgcggcttgcggatgttgcgaccatctgcaagtttttttaatttgccccggacgaccggtgagggtcattgttcggctcttctcataggcagtcttttcgtttttttcaggtttataaattggttatcgtatgacgatcgttccgttgtcttcgctgcgcgtataggtgaaatccgaggccatctgcaacaggcgcagcgccgaatcgacgccgtccgaaatgcggatcttgccgtggttgtaatcgacctccggcatccgggcgcggtcgatccgtatcttcacgccgaagctcttttcgaatttgtgcatcagctccccgaacgaaaggcccttgatgctgatcatcccttcggtccagaggtagtcgtccatgctgccgatcgcattcaggttcagccgccgccccgccagccgcacctcctcgttgggcttgaggacgaactgttcgccgggcgtcaggcggttggtcaccttcacgcttccgcgcagcagggccgccgagaacaatccctcgcgctcctcggccatcacgtcgaatttggttcccagcacctcgacgtcgcaggcgaacgtctcgaccacgaacggatgcgcgggatcgtgctcgacatcgaacatcgcctcgcccgcaaccttcacgcgccgctcgcccccggcgaacaccagcggatactccagccgggttcccgcattgagccagaccttggtgccgtcctgcaactccatgctcaggtactgccccgcaggcacttcgagcgccgtcgtccgccgcgtccactcttcgatccggtcgtcggcaagcatccgggccacgccgatgccgacgaccgccacggcggccagctccgcggcataacgcacgatgcggcgcagcggaatgcgacccagcgaaatgcggcgcgccgccttcttcgctggcgcaggcgacagcacgtcgggaccgtaaatgaccgaagcggccatcactttgtccagctcgtccaattcgcgcacatgcgcgggatcggcgtcgagccagtcgagcacctgcttcatctcgtcatcggtcgccgtattttccaaatatttatagataagttccggattcatctctctcttcgtctgtttctataaaaacgaataagtgcgcccgattcccaatcagacgcacttggatttgctaaaaaaatatttttaataattcacgctctcgaattcaggatcgcaaaatattatccgacagcaacataagcagcacgggcaaataatccttcaacgccacgcgcagctgcttcacggccttttccagttcgaattcgacgcgccgcacggtgatgccgtacttttcggcgatctccttgtagctcagctcctcgaagcggcgggcgacgaacacttcgcgtgtcagttcgggcaggcggtcgagcgactgccgcacgatcgcggccacctccgccgagaaaatctcctcaggattgaacgcctgcagcgaccgtatgtcggccgccagcacccgccgcctaagctcgtacacctcctgctcgatcttggcatgcaggctttgggcgcgcagccagtcgaggcatttgttgcggacgataatcaggatataggcctgcaggttggcatcggcgggaatccggccgcggttctcccagaaggacatgaagctgtccgagacgagatcctcggccaccgccgcgctccgcacgtagcggcacgcgatcgcttcgaaccgcgcgcgccacgtagcgaacaggcggccgaattcggccgtcgtcatcgcaacggactcgcgtccctgtattcgcacggcggtcttctccacgtccactcccggttttattctacgatgatttcatccacgaacatatgcgccttctgtccggccgcgccgtgccatgccggaatcggatcgaccgtacgggccaccacgcgcaggtagcgggccgaggtttcggggaagagcaccttgaacggcttgacgccgtcggggctgccggccgtctcctgcggcacggacatcagcgccgcctcggtgaactcgctgccgtcgtccgagaggtagacccccaccgacgaaggcgggaaaacccactcgcccttctcgaccagcgattcgacggtcaccgccgaatagggcttcgccccctgcatgtcgatcgtaacgtccagcggctcgttcaggaacccgatccacgcgccgttcgaatagacgggacctccgcggtaaccgtccaccagcagcgaagcgccgccgtaggtatatttgagcgtcggcgcggcgttcagcgcgatgcgccgtccggtcgccttgttgaaatcgaatttccgcgcataaaccggcgtctgcatgccttcgcgcagggccgcggccttgaacgtgcagctttcgccgatggtcaccggcgccttgtaaagcggactcgaagccgtgggatctgagccgtcgagcgtgtaacggatcggcgcaccgccctgtgtggtgagggtcatcacgacgccccccttctccggatcgaccgcatacgaagccgtcaccccgaagatatgcttggcgaactcatatcccatctgagaatagatttcgtccatcctgaaactgccgatgaagcggttccagtccttcgtttcgggcagacaccactgcacctcgctcaaggcggccagacgcggcagaagcatgtattcgaggtgttcgtcgctcaagacgtattcggtccagaggttggcctgcacgccgagaatatgtttctgctgttcgggcgtcagctccgggaacgccggatcgtacgaatagacctgctccatcggtatgtaaccgccgattccgaacggctcggcgtcggtgtcgagcgactggtagtagtcgaaatagaagtgcgaattcggcgtcatgatgacgtcgtgccccaacttggccgcggcgattccgccctcgctgccgcgccacgacatgacaacggcgtcggagggcgccctgccttccagaatctcgtcccagccgatgatgcggcggccgtgctgcgcaaggaatttgccgatgcggtcggtcacgtagctctgcaggtaatgctcggcagtatgctctccgtcgtccttcaggccgagctggcggatcttcgcctgacagcgcggacacttctcccagcgcaccttcgggcactcgtcgccgccgatatggatatactccgaggggaacagctccatcacctcggtcaatacgccttcgaggaattcgaaagtcttctcccgtccggggcaaagcacatcgtcggccacgccccagcggccccacacctcgtacggaccgcccgtgcagcccagttcgggataggcggtcagcgccgccagcatatggcccggcaggtcgatttcgggaatcaccgtaacaccccggtcggcggcatatttcaccacgtcgcggatctcgtcctgcgtatagaaaccgccgtagggcgtaccgtcataggttccccactccttgcggaccacagtggccttgcggatgctgcccacggcggtcagctccggatagcgcttgatctcgatgcgccagccctgatcgtcggtcaggtgccagtgcagcgtattgagcttgtgtatggccatcacgtcgatataccgcttcacttcgtccaccgagaagaagtggcgcgccacgtcgaggtgcatgccccggtatgcgaaccgcggcgcgtcggcgatcttcacgcagggcacctcccacgccgcatcgggcgcaggctccgtgccgtaaaccgccgcaggcagcagttgttcgagactttgcagggcatagaggaagccgggaaactgcgacgcccgcacttcgattccctccccgtccacgttcagttcatagccttcggccgggagcgattcgtccgtgacgaaacggatgcccgacgcgggcacctcgtcggcgaccgtgacgggattcgtcccgccggtaaccgtcgccagccgtgcggcgaatccgaccacggcgcgctgcgtccgctcgtcggtgcgactgtcacacgtaacgggccgatcggtcacccgataggttccccgaccggtttcgagatgattgggatagggcacgatcgcgatctgcggatcgtgcgaaccgcaggaacaaagaactattccggcagccagagtcaaaagtagttttttcataatttattttgggtagcttaaggcaaaaatagagaaaaattccaaatatcgcctgccgggccgaaaaaattaccgctccggggatccgttccggagccgttgccccatttttccgtacgctttttccggccggaaatgggattatcgggcattttttataactttgcgacgcttaatgcttgcaaaactatgaaaaccgactttctggttatcggttccggcgcggcaggcctttcgttcgcgctcaaagccgccgcccacggacacgtcaccatcgtgacgaagggcgaaatgaacgagtgcaacaccaactatgcgcaaggcggcatctgctcggtaacgtacgcccccgacactttcgagaaacacatccgcgacacgctggtctgcggcgcgggcaaatgcgacgaagaggccgtcggactggtcgtgcgccgggcgccggagctgattcgggacctgatcgaatggggtacgcgcttcgacaagactcccgacgggcgtttcgagctgaaccgcgaaggcggccacaccgagcaccgcatcctccaccacgaggacctgacgggcgccgagatcgaacgggcgctcatcgagtcggtccgcaggcatcccggcatcaccgtactcgaacaccgcttcgccatcgacctgctgacgcagcaccatctgggcgagttcgtcacgcgccacacccgcggcctgacctgcttcggggcctacgtcctgaatctcgaaacgaacgaaatcgagaccatgctggccaaattcaccgtcgtcgccacgggcggctgcggcaacatctactccacgacctccaatccggtcgtcgccacgggcgacggcatcgccatgtgccaccgcgccaaggcgatcaccgaaaacatggagttcatccaattccaccccaccacgctctacaaccccggcgagaagcccaacttcctcatcaccgaggccatgcgcggcttcggagccatcctgcgcctgcccggcggcgaggagttcatggacaaataccacccgatgaaatcgctggcgccccgcgacgtggtggcccgcgccatctaccgcgaaatgaccaagcggggatcggacttcgtctacctcgacgtcacgcacaaagatcccgacgccgtgcgcagccacttccccaacatctacgagaagtgcctttcgatcggcatcgacatcaccaaggactggattcccgtcactcccgcggcacactactgctgcggcggcgtcaaggtggacaccaacggcgaaacctccatcaaacggctctacgcgctgggcgaaacctcctgcacgggactgcacggcgcaaaccggctggcatccaattcgctgatcgaggcggtggtatacgccgatcaggcggcgcgccacgcatcgtcgctgctcgaccgggtcgaaattcaggagggcattcccgactgggacttcgaaggcacgcagcacaccgaggagatgctgatgatcatccagtcgaagcgcgaaatgcagacgctgatgtccaactacgtgggcatcgtccgctcgaacctctcgctcaagcgcgccatgcggcggctggaaatcctgtggcaggagaccgaggagctttacaacaaaaccaagcccaaccgcgaactgtgcgaactgcgcaacatgatcgccgtggcctatctggtcatcaagcagggccgcgaaatcaaggagtcggtcggctgccacttcaacgccgactacccgaaggagaactaaggattgccgccggcggaacagcgcccggcactccccgcaataaaacagacacacattcagttacatgacattacaggaagagatcacacgccgccgcaccttcgcggtcatcgcccaccccgacgcgggtaaaaccacccttaccgagaaactgctcctcttcggcggcgccatccacgtcgccggggccgtcaagagcaacaagatcaagaagggcgccacttcggacttcatggagatcgaacgccagcgcggaatctcggtcgccacggccgtgatgggcttcgaatacaagggcgcgaagatcaacattctcgacactccgggccacgaagacttcgccgaggacaccttccgcacgctgacggccgtcgattcggtcatcatcgtcatcgacggcgccaagggcgtcgagtcgcagacgcgcaagctgatggaggtctgccgcatgcgctcgaccccggtaatcgtcttcatcaacaagctcgaccgcccctcgaaggagccgttcgacctgctggacgaggtcgaaaaggagctcaacatccgcgtgcggccgctggccttcccgatctcgaacggccccacgttcaagggcgtatacaacctctacgagaaaaacctctcgctcttcacctccgacgagaagctcacggccgacgcctcgaccgtcgaaatctcggacctcgcctcttcggagctggaggcccagatcggcgacaaattcgcggcccagctgcgctcggacgtcgagctggtcgagggcgtttacgacgatttcgaccgcggggcctacctgcggggcgaactggccccggtattcttcggttcggcggtcaacaacttcggcgtgcgcgagctgctcgaatgcttcgtgcgcatagccccctcgccgtgcccggccccgaccgaaacccgcatcgtggagcctgcggaacccaaaatgacgggcttcgtcttcaagatccacgccaacatggatcccaaccaccgcgaccgcatcgcattcctcaaaatatgttcgggcacgttcgaacgcaacaaaaactacctgcatgtgcgcagcggcaagcagctcaaattctcgtcgccgacggccttcatggccgagaagaagtcgatcatcgacttcgcctatccgggcgacatcgtgggcctgcacgacacgggcaacttcaagatcggcgacaccttcaccgaaggcgaaaagctcaaattcacgggcatcccgtcgttcgcccccgaacagttccgctatatcgagaacgccgacccgctgaaattcaagcagctcgccaaaggcgtggaccagctcatggacgagggcgtggcgcagttgttcgtcagctccctcaacggccgcaagatcatcggcacggtgggcgcgctccagttcgaagtcatccagtataggctcgaacacgagtacaacgccgcctgccgctgggagccgatctcgatctacaaagcctgctggatcgagagcgacaacgccgcgcagctggccgacttcaaacgccgcaagcacaccaacatggccgtcgacaagcacggccgcgacgtcttcctcgccgacacgagctacggactcgccctcgcgcaggagaatttcaaggatatccggttccacttcacctcggaattctgacgcagcggcgccgggcgcaacacccctcccggcaaaacccatctttccggcgccttcgccgaccgacgcaaaaaaagggctgtcccgtgggacagcccttttccttcgcactccccttcggaagcgttcgccgcacccgaaggaggaaggaatttgccggaaaactcctttgcttcgtcttgtcaaacctccatgggaacttcgataatcagcaccttcgcgtcggtttctcccttgatcgggaactcgtccgccccggtgatgcccatgccgtcgcgcggtcccagctcctcgcccgccgcctcgacgctgccttcgatcacgaagacgtaggcgccgtggccgcgggtattcatgcggtattcgaccacacgatccttgtcgaggtccagcgtatagaaccaagcgtcctgatgcacccatcccacatgctcgccgccgcggccttcgggcgccacgatcacatgcggaacgttgcgcttggcgggcgccagctcgacctgattgtagcggggcgtgtggttctgcgcgtcggtcagcacccatatctgcaggaacttgaccggctcggtctcgctggcgttcatctcgctgtgcgtgatgcccgtgccggccgacatcacctgaatctctcccggacgcaggactttcatgttgcccatgctgtcgccgtgcctgagcgcgccttccagcgcgatcgacacgatctccatgttgtcgtgcggatgggttccgaaaccctcgcccggagccacggtgtcgtcgttcagcacccggagggcgccgaaatgcacccggcggggatcgtaatagtttgcaaaactgaacgtatggtgagtctgcagccaaccgtggtcggcataaccgcgcgactcggcgcggtgaatcgtcttgttcataacgggattttttgattttaaactttaacggaccggggagcaaactccgcgccagtcgcacctccgcgcggcacattacggaatccgcagatgcgactacactttcagaaaaacgttctttctgtaaaggaagtagagaaacagccagcagacggccacataacccgcactgcttatcacggcagccacggcctcagggcatttcgatgcgatgccgccgaggaagaagtcggatatacgtccgaagcccacgatacgctgggccagataaatcgtaatcgaattgagtccgacgacacggaaaaagagcgtccagcggcgccagccccgcacgtcgatcaggtagtaaaacagggcgaacatccccagcgagtaggctcccacgacgcatacgaaggtgctcgaccacagtttcttgttcacgggcagcaccccgctgaaggccagccccgccgccagcagcgccgcggccgccgcggccatccaaagcgtcttgcggccgccccgaatatcgccgcgccttacgaattcgcccgtaaacatgcccagcatggctgtcaccacggcgggcaccgtgctgagcagcccttcgggatcgaacgacccgtatatcagctttccgggcaggaactgccggtcgatatagcctgccagattcccctcgaaggtcagcggcccggcgcctgcggcgtcgggcgccgcgaccagcgccgaaagcgctccgtaaccggccagcaccgcgacggcgattgccgcacgggtcttcacgccgaaattgagatacagcaccgcggcgatgctccacgccagtccgatgcgtcccagtacgctcgcgatccgcagattctcgaaatcgagcttgaacagtccgttgtaaaccatgcccagcacgacgagcgtcagtccccggcggacgatcttggcatagatgcgcccttcggacattcctcccgcacgctgcttggcgaccgagtagggaaagctgaccccggcaatgaagaggaacagcggaaagatcgtatcgtgatgggcgaagccgtcccacgcgacatggctcatcgaagcggctgccgcatcggtcacggccgaaggccacaagccgcacacggccacgacgagcgacgcgaaccccatgatgaagagcatgtcgaacccgcggagggcgtcgagcgacatcaatctttcggactgtttcataattctgcctgcacgaaaaccggaacatgccccgaacggcgctccggacatcggcgccggtcttcatttatcgttcttacaaagataataaatattcctgatatatgcaacagtttcgaggcccggccggaatcgcttccgccgggcctcctcatcgctgtttcgtaccgaatcactccagttcaaggttgctcacccgcccggtcaccccgaacgggaaatcggggtatacgtaaagcccgaaccggggttcggtctcgccgtgcgtatagttccagatgctggcgtaatcgtccgcatcctcgcccatgttttccagctggcgcaggtaggcggccagcgatttgttctcgacgatatagatttcgcccatccggtcgatgatcggactgtggcggcgcgtgcggtcatggtcgaagcgcaggatgcgcctgccttcgggcgtaatgcccaccagcctgaacgacatgctcttgccgatggccggcaggttcagcacgctgcggtcggtcgcaaggaacggcagccggtgtctcttcataaagcggcggagccgttcggccgtgtcgccgcccttctccagctctgcatccagctccccggcctgttcgggcgtcagccggccgtaaatcttctcctcgtgctgttcctgcagcgaccggctgttgggcgtaaagacggcgtaattctcctgaaaccccttcaccgagaaggtgtagtagcagaccacgcccagcgcattgagcacctgccgcagccgggtcgtatgcccgcggcgcgacgccgcgacggtatagaccagctggttggtgacgagccacccggccgcgagtatcctgcggatcgcctcctgcgcttcgggcgtcacctccagcggcgactggaaatgggtctggatgatgaactgccgcacgccgacggccgaagccttctgcttgaactccctgagcacctccaccaatccgtcgtcgatacgcatcggcagataggccggcaggcgcgaaccgagacgcacgcgctgcagttcggcgtatttctcgccgtcgggccgcccggcgttggccttgcgcttgcggcaggccatgcggtatacggcctccagtatattgtgcagcgtcttgttctggctcatcagggcgtccccgcccgtgataaggatgtcgcgcagctgcgtgtcttcttcgaaataggtcatcaggcggcgcagcttgtggtcccagctctccttgggccgcaggctctcgaactcgaagttgagccgttcgctctgaaaatcgtacatgcgctggcacgacgcgcacaacccgccgcaggcgcgtcccatcgtgtcgggaatcaggatcgccacctccggatagcggcggtggatattgtggccgtcgggcagcagccaccccgcggcattgggctttccggcttcgacgacgtcctccttctcccacgcgcggatgctgccgtaggtctcgaccagctgcggcgagtagaggatatagctgcggatcgcctcatcgccgtatccttttccggtcacgtccagcagcgagagataatagggcgtggcgaagaacggcatccccttcttgcgggccttcgacagcaggtacatggtctccgccgaaagcgaattgcccagaaagcggttcagctccgaggggcttttcaccgccatcgccagatgaaacctgaaatcgttccaccagatggccacctgacggtatttgtcttcataactcatcccctccgcgaaacggaaccgcgagggcgtcgatttgcggttctcgatcttctgcaccagcagatgcagcatgcgctccctgttgtcggccctgatctcccgcacctcggcatcgagtcccgaaggccagcgctcggagcggatgcggacacgctgcatcgaaagcggcggcagttccgctcctccgagacgtttgaacaggtagaacaggtcgataaacaggtccgtgcgcatctccacattctccagacagcccgtaagaaactgccacaacagcgtcagcgtccgcaccggcatccgctcgccggtagacagttcatcgacctcccgcccgtcgtaatcgatcagcagccgaatctgctcgcccgcatcgccctgcgcggactccgaacgggagacccactcgcccagacgccttcggaactgcacggcgtcgccgctcgcctcggcggcggcgacaagttcgggtaactcgtgacggtaaagctgtccaagctggtagagcgtgagcgcaagcatttttctttgtttcataagctgttgtttttcgtgttaagcatctgttgacaggggaccgccgcaatcccgcatcgcgggcgtcgtctcacgaagtgcgggacaggcccggcgcgaaaaaaaatcgcagaaatccgctgatcgcaagaaaccccggcaaattcctccgcatttgaaaaacattccggggaaaatcgacattttttccgccgcaaacatccagaattgctatcgaaggggtataaaggcaaaaatctgcggtctgcacgacatgaataataacggccgcaacacggggttttgtgcaaagatacgaaaaaaaatcgacattccccggcccggcgtccgacggccccgccccttttccccgtcggccgtggcgtcagccgcccgtttcagccactgccgccaaaacaaaatcagccgcctatgttttcacataagcggctgactctcagcttgtcggggtgacaagattcgaacttgcgaccacgcgccccccagacgcgtactctaaccgggctgagctacaccccgtagcgtttcggagtgcaaatatagtatatttttcacaaaccggcacatttctgcaagatttttttctaattttgtcctcgatgaaaagattcccgcccctcataccgctcctgctggcgcttctcggcactgcctgcggaggctccgcgagctacactccggccgatttcacgaccgaagtctatacccctgcatacgcttcgggattcgacatccgcggcacggaacgcaatgcggcgacgctcgtcaccgtccgcaccccgtggcagggcggtagcggcgtcgaacagcatctgctcgttctgcgcgagggcatcgaacctcccgccggtttcgacggccaaatcgtgaaagcccccgtacgccatgtggtctgcatgtcgtcgagccacgtagccatgttcgacgccatcggtcagatacgtcgcgtctgcggcgtctccggaatcgactacatttccaacgcctatgtcaacgaacaccgctgctgcggcgaggtcctcgacgtgggctacgacacgaacctcaacttcgagcggctcgccgccatgcagcccgacctgatgctgctgtacggcgtcacgggcgaaaacaccgtcgtcacgggcaaactccgcgaactgggcataccctatatatatgtaggcgactacatggaagaatcgccgctgggcaaagccgaatggctgatggtcgccgccgaactctgcaacgaccgcagccggggcgccgaaaccttcggcggcatcgccgaacgctacagagccgtcaaaaccgccgtcgccggttccgcacccgccgtccgccccaaagtgatgctcaacaccccttaccgcgacacttggttcatgccttcgtcgcgcagtttcatgatccgcctgatcgaggacgccgggggtgaatacgtctacacgaagaacgactcggacacctccgtcgccgtagacctcgaagaggcctatctgctggccagctcggcagacgtctggctcaacgtaggcccgtgcaacacccttgcggaactgacggcccagaacccgaaattcgccggcatcccggccgtccgcaaccgcatggtcttcaacaacaaccgccgccagaccccggccggcggctccgacttctgggaatcgggcgtcatacaccccgatctggtgctgcgcgacctgagcctgatcctcggcggcaagcctgccgaagagggagaactccactactacaaacgtctggaataacaaacaccccgctcgcaatgtccggacgccgcaccgccatacttttcaccgttctgtcgctgctgaccgccgcgcttttcacggccgacctgctgatcggctcggtcgcagtggccctgcgcgacatctgggccgcgctcacgggcggttcgtgcgacccggccgtgcgcgacatcatcctcaaaatccgcctgctcaaagccgtcacggcgctcttcgccggcgcggccctcgccgccagcggcctgcagatgcagaccctcttccgcaatccgctcgccggtccctacgtgctgggcatcagttcgggcgccggtctgggcgtggcgctgttcctcttgggcgcgcccctgctgggcgtctcggcgcactcgttcgtccagtcgctcggcatcgcgggcgcagcgtggctcggcgcggccctcgtgctgctgatcgtcatggccgtcagccgccgcatcaaagacatcatggtgatcctgatcctcggcatgatgttcggttcgggcgtcagctccgtggtcgaaatcctccagtacctttcgagcgaagcggcgctcaaatcgttcgtcatctggaccatgggctctctgggcgacgtcacgggcggcaacctcgtcctgatgctcccggtcatcaccgcgggtctcgcgctctccgtcgccgtcatcaagccgctcaacctgctgctgctgggcgaaaactacgcccgcacgatgggtctcaacatccagcgcacccgcacgctgctgttcctctccacggtcctgctcgcaggcaccgtcacggccttctgcggcccggtgggattcatcggactggccgtgccgcacctcgcgcgcatgctcttcgccagcgccgaccaccgcgtcctgatgcccgcgtcgatgctttcgggcgccgccctgctgctggtctgcgaccttatttccaaatcgctggccctcccgatcaacaccgtcacggccctgatgggcatccccgtggtgatcgtcgtagtcgtccgcaaccgcaatctcttctgaaatgagcatcgcccttcgccatatcaccctcgcctacggccagcgcatcctgctgcgcgacgtctcggcctcggtccctccgggatcgctcacggccctgatcggccgcaacggcaccggcaagagcaccctgctgcggaccgtcgccggtctgggcgccgccgcgtccggcgggatcgaactctgcggcaaacccctcgcagcgctcaccccgctccagcgggcttcgaccgtcagcttcgtcaccaccgacaaggtgcgcatcgccaacctcgcctgcgaagacgtcgtggccctcggccgcgccccctacaccaactggatcggacgcatgcaggagaccgaccgcgacatcgtggcccgttcgctccggctggtcggcatggaggctttcgcctgcaaaacgatggaccgcatgtccgacggcgaatgccagcgcatcctgatcgcccgtgcgctggcgcaggacacccccgtgatcctgctcgacgaacccaccgccttcctcgaccttccgaaccgttacgaactggcgacgctgctgcgccgtctggcccacgacgagggtaaatgcatcctcttctcgacgcacgacctcgacgtcgcgctgggattgtgcgacgccgtcgcgctgatcgacacgcccgacctgcactgccttcccgcctccgacatggcctccagcggccatatcgagcggcttttcgccggcgccggcatctcgttcgaccccgcgacgctgacgatccggctcacaaaaaagtaacgaattcaatatttttcggctttttttttgttcgactcacttttttgtttacctttgcaccgctaaagttacccttacaaggggcagcaatagtggtaaaggcccattcgtctatcggttaggacgcaagattttcattcttgaaagaggagttcgactctcctatgggctactaacgaggagacctgcgggccggcacgaaaccagagaggggaggggaggcgaatcccggaacttcggaaagccgcaaggcggacggcggcatgcggatctctacgggtgatacttttcgaggagcggaccgagcgtctatccacacgcagccacggctgtttaccgatttagcaactgaaaaagtaaaaaataaaaaactggaattatggcaaaccataagtcatcgaaaaagcgaattcgtcagacgctgaccaagcgcgcccacaaccgtctttaccacaagacggcacgcaatgccgtgaaagcgctccgcaacaccacggagaagagcgccgccgaggccctgcttcccaaggtaaccgccatgctggacaaacttgcaaagcacaacatcgtgcacaagaacaaggccgccaacctcaaaagcgccatccagctgcacgtgaacgcgctctaagccacttcgcccaaaattcaaagccgcccgacgaaggcggctttttcatttcatcaccccacctaacctttcggctcaccgcttccggaaacaccccgccccctcgccgtagtccagccgccacaccgccgctgtccgacatcccgacatacaccgtcaaaaagaagccgcccgcacacctgcggacggcccgttctccaaccctttcgggaaattcccgcacggtttactccttctcggcaaacccctgcgcccgcagccggatatccgacccgtcgggcgtcaccagataggccccggtcgattcgggcgtaatgtggccgattacatcgacgcaccccatcttcatcacctgctcctgcatcgccagcggcaccgtgaagagcagttcatgatcctccccgccgttcagggccgccaccacgggatcggcgtgcagctcctcggccagcgcatacgtctgcttggcgatcggaatccggtccagataaatccgcgccccgcacttcgaggccttgcaaatctgcagcaggtcgctggccagtccgtccgacaggtcgatcatcgacgtcggaacgatgccctcctccgccaacgcatccacaatgtccctgcgcagacggggtttgaggtatttttcgagcaggtactcatatcccccgaacttcggttcgggattctccacgtccgccaacacgcgcttctcgcgctccagcagccgcagccccatgtaggccgctccgaggttgcccgaaatgcagatcaggtcgttctgctgcgctccgccgcgcgacacgatccgctccttgggggcatgccctgccgccgtcaggctcagcaccagccccgtcaccgaagccttcgtgtctcctccaaccagatcgatcccctgctccctgcaggcgaaagcgatcccttcgtaaagctcctgcaacgcctcgaccgacatcttggccgacacgcccagcgagaccatcagctgcgaaggccgggcgttcatcgccagaatatcgcttccggccaccgtcacggccttgtaacccagatgtttgagcgggaaataggtcaggtcgaaatcgacgccttccgtcagcaggtccgtcgagcagagcacggcttcgcccgcaggaggcagcatgacagccgcgtcgtcgcccacggcccgcagcgtcgagtcgttcgtcggttcgaccccgctggtcagcagatctatcaggccgaactctcccaattcggcgatttcggtacgtcgtttcttttccatattataaatttttttacaaaattagggaatctttgctctttcccaaaaatttaacgtatttttgtccggtaaatcccaaaaacggtttctataatgataaacatcgtcttattcggtgcgccgggctgcgggaaaggcacgcaggcgcaacggctgaaagcacactacggcatcgagcacgtctcgacgggcgaggttatccgcgacgagatccgccgcggcacggaactcggacgcagtatggaatcctacatcaaagcgggcaaactggcccccgacgaaatcgtcatcggcatgatcgccaactacgtcgccgaacacaagcacgccaagggctgcattttcgacggttttccccgcactacggttcaggccgaggagttcgacaaaatcctcgccggacacggtcttcaggtcgacatcatgatcgacatccacgttcccgaagaggagctgatccagcgcatcctgctccgcggcaaggattcgggccgcgcggacgacgcctctgaggaggtcatccgcggccgtctcgacgtctaccgccagcagacggccgtcgtgtcggactactacgccgcacagggcaaatacgcatcggtaaacggcacgggcacgatggacgacgtcttcgcccgcatcaccgacgtcatcgctcaactttaaccgcagcgccccccccaaaaaaaacacaaatccggaacgcacgatgcgttccggatttttcttgcccccggttttctcccgctccgccgctctgcccctgctccgccgccctaccccctgctccgccgtcctaccccctgctccgccgtcctgtccctgctccgccgtcctgtccccgccccggctgacctcccgcgcacggtccgacatctccgccacgccccgtcgccatgccccatcccgcgccccaatcccccgttcctcgccccgctcccgccgtccaccctcacacggccaatcacccttacacgccccagcccccacatgcggccctgccccgccccggcacaaaaacgccccgccccggcaccacgtttcctttttttcgttatatttgcacttaaggcgttatggtgacgccttatcccacttaaatttttaataccatgaaaaaatccttactctacgcaacgctcctctgcgcaggattctatgcggcgtcctgttccgacaacgagggggggggaaagagcctgaccccgcacccgaatattttcgggtagccttcgacggccccgcactggcggccgaactcaacaccgacttcacggcattctgccgtaagtatgccgaatacgtcgccgatcccgccgaaaacgccttctccatgcggccgtcgtccgccgctccgagcatgaacatgccccagccgccctccgtcttctacttgggcagctacctcaaaaccccgaccgacagcatcctgctcaccctctgcgtcgaaaaggacgattacgacaacgtgaaaacgatcacggccgcacccgaagatccggccaaatccctcgacgtctggcaatacggtctgaccgcctccgaaacgctccgtctgggcgcgttcctcggcaccaaatacaaaagcccctcttcgtcgggcgtattccagaccatcgacgacaccctgaaccacatcgcccagcacggcaccgccgaaacgctcgcctgcacgatcttcggcgtcgttccacaggccgcatacgccgtcttccaactcgacaacggggccttcaccgcccggctcatgaacagctaccttaagctggactatcccgcaatgcgccgctggctcggcggcgaccacgccgccttcgctgcggagtactacgttctaggcaacaagatcaacgccttcggcgacctctacgtctacttctactatgccaaggacaccgccggcaacaccttcaccgtcgacgtacacgccgacaagaacggcgagaaaatctccgaaatcgacgtctacgtcagcgccgaccgcaacgacgccgacaagcagctggccatctggaaggaatacgcccgcgactacgcggacaaaggtctgggcgccttcaaagaggcctatacgaccgattcgtggggcgaccggaaggagacgttcgccgatcttgccgcagcggtcgcccatgtcgaatccaacggccggccgggtcccttcgacggcggcatcatcgtcgttttcgaagccgacggcgtcgccacgaatctggtgatgaaccagcagtacatctacctgctgatcaaggacccgaactacaacgtcgaataacctcacacacagccgcaaacccctccggcaggccgtccccggccctccggagcgaaattaaccggccgaatgtcaaaaaaaggggcgcttccttgcggaggtgccttttttttcttacatttgcacccgctgaaaagcgtaaattaatttaattccaacaattatgaacaattacgaaaccgttttcattgtcacgccggttctgtccgatgctcaggttcaggaggttgctgacaaattccaaggtgtcatcaccgagaacggcggtcagattgtgaacaaggagtcgtggggccttcgcaagctcgcctatcctattcagaagaagaccaccggtttttacttcttggtagagttcacgggcgaaggcatgctcatcaacacgctcgaaacgcagtaccgccgcgacgagcgtatcatccgtttcttaacattcaagcaggacaaattcgccgtcgagtattcggagaagcgtcgtgcaaaactttctaacaaatcggaggagtaaaccatggcacaggagaacaaagcacagtctgaaatccgttacctcaacccggtgtcggtagacgtcaagaaaaagaaatactgccgcttcaagaaactcggcatcagatacgtggactacaaggacggagaattcttgaagaagttcctcaacgagcagggcaagatccttccccgccgcctgacgggtacttcgcagaagttccagaagaaggtcgcacaggccgtgaagcgtgcgcgtcacctcgccattctgcccttcgtaaccgattgcatgaaataattaaaggaggaagagacaatggaagttattctgatcaaagatatggaaaatctgggttacgccaacgacatcgtgaacgtaaaacccggttacgcgaacaactacctgatccctcagggttacgccaaggctgccacggcatccgccaagaaggtcctcgccgagaatctccgccagcgcgctcacaaggacgccaagatcctcgccgacgctcaggcgctcgccgagaccatcgccaacctgccgctgtcgctggccgtgaaggccgaggagggcaaactcttcggtacggttaccgccgccgatctggccgaggcgcttgccgccaaaggcatcgagctcgaccgcaaggtgatcgtcgttgacgccatcaagaccgtcggcgaatacgaggctgtcgccaaactccacaaggaggtcaaggcagtcatcaaattctcggttaccgccgccgaataatccggggacggaggacctgccaccgggtgcggcgacaatcccggcaacggggtccgagtccggcaagacagtaaaaaggagagcttcaggctctcctttttcattttcgccggcgctccttttccatttcgggcagttcccggctccgccccggcatttcgcatctctttccgcatccgtctctctacactccccaaattccccttcaccttccaccgaatttcacttcgggcgccatccggagccccggccacaccgtaaccgtctgcgccctaatgcggcgcggccgtcggcggatctacatgccgcggcggcaccgagtaggagcggagcaccagccccaccccgacgaagatcaccaaggcgaaaatcaccgtgtcggcgtgcagtttgtcgagtcccatgcccaccgaaatggcgatcgccagtacgggctgcaaataggtgtatatgctcgacaccgtcgcgggcacgctcttcagcgcatagttgagcatcaggttgggaagataggtcggcaccgtcagcacgaacagcgtcgggaaaagcgcatgcttcgcaatggcggcgtaatccgtatgaacgatctccttcaggccgaagggcagggcgacgaccgccgccacgcagtaaagccacctcaacacggtcgtaatccggtatttggcgatcagccgcttgaaccacaccatgtagagcgacgtaacgcaggcgcagagcagaatcatcacgttgccccagaggtgcgaatgctggtgcgacgacgacgcgcccgccagcaccacggccacggcacccgccatgccgagcaccagccccgcgatcttcaatttcgtgaaacggtccatccccagcaacaccgagagcagcagcaccagcagcggcacgatggtgtcgatgatcgagccgtcgatgggcgaagtcatcgaaaggccgtacatgatgaacaccttgcgcagcacgccgatcagcagcgcggcgccgatcagcttgcgcacgtcggcctttgcgaccttttcggccttctgccacaacagcggcaccagcgaaaagagcgccgtcgcgatcagcgacccggagaccatcgccatcggatggacgtaacgcggcagcacgatgttgtaaaaagggtagtccatggcccatacgatattgcaaatcagcagggcgatatggggtttgaatctgttcatccgtttcggggtttatcccgcccaaaaacaaaaacagtgtccgtcctcccgtcccgtctccttcgcggccatgccgcccgcagcaccgcccaaaggccgtccgtcggacgacgcgcccgctccgcacctcctccgaagtgctgcgccggagagggctggcatggaagttgttttttaaaagaccgattttgctgcaatcgcagcccccttgcacattaaaaactttaaaacgaaacgttatgaacaccaagaaaaacaaaaaaaccgattcgccccacttccgtgaattcttcctcgaccagatcaaagacgtctactgggccgagaaacacctttcgtccggactcaaaaagatgagaaaggccgccaccagcccgaagctggccgccgcattcgagaaacacatcgaggagaccgcaggccagatcgaacggctgaagcgggttttcgaactgctgggcaaaaccccgcaggccaagaagtgcgaagccatggaaggacttgtctccgaggccgaaagcatgatcgaggacacccggaaagactcctatacgcgggatgcgggccttattctggccgcccagaaagccgaacattacgagatcgcctcgtacggcacgctgaaagtcttcgccgagatgatgggcgagaccgaaatcgcccgcgaactgggcatgatcctcaaagaggaggtctccaccgactcgctgctctcgtgtctggccgaagaggatgtgaacgaaatggccgtggccgaataatgcccgccctccgggccggaaaggccgaacctccgacccgactataacgattttcccctgccgcagatcgtcgcggcaggggaaaatcgcttccgggccctttcccggtcgctgcgtcgtgccgtcaccgccgctgcgaagggacttcaaacgtggccggagacgcgccgtcgatcttttcgccccggtaatagacgctccacgcatcctttccataccctttgccgatattttcgaacgacgaagccgaagcgccgccgactttgcggccctgaaaaaacaccgtccacgcatcctttccgtatcccccgccgagactgacgaacgaaccggccgcagccccttccacctcgcgctcccggtaatagaccgtccagctgtctttggaatagccgccgcccagcgtccgggtcatcttcgcattcgcacgctgccgctccccgtacagataggtattccaattatccctgccgcgtccctttcccagactctcgaacgacgaagccgaagcgccctttacctcttcaccgcagtaaaacaccttccagttgtccttgccgtagccgtcccccagatcgacgaacgacgaagccgaagccccctcgaccttcagcccccggtaataaaccgtccagctgtccttggaatacccttcgggccttctgtcccgccccgaatgcacgccgccgtgccgggcagcgctcacctgagcgaaacacgcatccccgcccgacagaagcgcgaaggcggacagcaaaaccactatcatttttttcataatacagccgtcagttagtttctactattcaaaccccaaatatacccgcttattgcgccgcgcccaagaaatccgccgaaaaattcacccgccgccaccgattcgcagccatcgagagactttcgaccgacgagagatgtccgaacgacgagagacttccgaacgaccggaaaccgtcttctcacaaccgccccccccgacaaaaaaagtccgcaggctcacacctgcggactttcgcctatatcggacggaacgcaaccgctccgccctctcttccggggattactcctcggtctcctccttggcagcggctttcttggcgttcttcgcctcggcagcctccatggcgctcttcagagcggccagacctgcgatatcgcccagcgtcgtcttctcgaccgaagcgttgatcttcttcacggtcgatttggtcgcgtcggcagcggcacgcttctcagctttctcggctgcaacttcggcgcgcttggcctcctcgtacgtacgaacgtgcgaaagggtgatacgcttggtagccttcgagaactcgatcaccttgaagtcgagcttgtcgccggccttcggcgtggtgccgtcctccttggtgagctggcgtgcggggcagaagccctcgatgttctcgcccagagcgacaactgcgcccttgtcggtcatctcggtaatcgtaccctcgtggatgctgtccaccgagaactggttttcgaactcgttccacgggttctcctccagctgcttgtggcccagcgacagacgacggttctccttgtcgatctccagcaccacgacctcgatatccgcgcctaccgacgtgaattcgccggggtgcttcaccttcttggtccagctcaggtccgaaatgtggatcaggccgtcgataccctcctcgatctctacgaaaataccgaagttggtgaagttgcgaaccttggccgtgcacttcgtgccgacgggatatttggtttcgatattctcccacggatcgggcgtaagctgcttgatgccgagcgacatcttgcgctcctcacggtcgagcgtcaggataacggcctcgacctcgtcgccgaccttcatgaactcctgcgccgaacgcaggtgctggctccacgacatctccgacacgtggatcagaccctccacgccgggagcgatctccacgaacgcgccgtaatcggccatcacgaccacgcggcccttgaccttgtcgccgaccttgaggttctggtcgagcgcctcccacggatgagccgtaagctgcttcagacccagtgcgatacgcttcttggcgtcgtcgaagtcgaggatcacgacctgaatcttctggtcgagcgccacgatctcttcgggatggttcacgcggccccacgaaaggtccgtgatgtggatcagaccgtccacaccgcccagatcgacgaatacgccgtacgaagtgatgttcttgacggtaccttcgagaatctggcccttttcgagtttcgacatgatgacctgcttctgggcctcaagctcggcctcgatgagcgccttgtgcgaaacgaccacgttgcggaactcctgattgatcttgacgaccttgaattccatggtcttgtccacgtatacgtcgtagtcgcggatcggcttcacgtcgatctgcgaaccgggcaggaacgcctcgatgccgaatacgtctacgatcataccgcccttggtgcggcacttgatgtaacccttgatgatttcgtccttttcgagggcctcgttcacacggtcccacgacttgagctgacgggccttcttgtgcgaaagggccagctggccgttcttgtcctcggccgactcgacatacacttcgattttgtcgcccaccgccagatcggggttgtaacggaactcggaaacggggatgacgccctcgcttttgtagccgatgttcacaagaacctcacgcttggttatgccggttacggtaccttccacgacttcgccgacattgacgttcgaaagcgtcttgtcatacgcttcggcaatctcctccttgggctgcgaatagacgcccagatcgttttcaaatgcgttccagtcgaaattctcgtttgcgactacagttttcgtttcttccataacggaaatactttgtgcgatacaatcgctcgttaaatgattaataatgaaattcatagcccctcatccgcgcctcgtgcgcgcatacggggagtgcaaagatactcttttcaactgaaaaaatgaaagattgagcgcaaaaaatcgcttaccgacagttttttacaccttccgaccgcgggcacgccccggacgactccgccgccgcgcccgcacactttccggccgaccggtcgcgcagccgggacacagccgcaaatgcttttcccgcccgtcgcaggccccggtcacaaaccactgttccgtccggacgcaggccgtcccgtccgcaggcctacttccgccgcacccgctgccgcggcgtgttgtcgatccggagcggagagtcctcctccagctcttcgagcagaagcccggtcacatcctcctcggtaatcttgccgtcggtgtaattcaggtcgttgtaattcttgtagacgtaatcgctgacggcgaccgtgtagaccttcccttcgcgcaacttggggaactccacgtcgagcgcattgtccgcctgatcggtaacgatcacatagggcgttgtcgaaatcaggtcgatgcggtgcgcctccttgacgttcaccggatcgttgtatttcgaaacgatcatcctccgcatatccgccggcgtcatcttcatctcggccaccagcgtcccgaacggctccagcccgtatacgctggccgcgctcacgccgcccgcgggaatcgagtcgagccgcacgcccccgatgtggtagaatccgacctcggcgtcgatcccgtcggccaccgccccggccatccagttcgccagcccccatttgttcgcggcgttcccgaactcgcccatcggtctgttcagctccggattggcgtaacaggcgtccacctgcttctggaaaaccggatcaggctcgtaaccggccagcggcacgagccggaaatccacgccggcgaccttcctgcccttcatgcgtatcgtcgtgacgcctatgttccgcagatccttccccgtctgcgtgagcagcgtgccgccgatcagcgtatcgacctcctcgtgcgtgtgcccgccgatcaccacgtcgtactgcgaagcgcccccggcgagcagttcccggtcgcggtcgtcgcccatgtgcgaaacgagcaccagcacgtcgcacttcgggcgcagctcggcggcgtatttcaacgccatctgctgcggatcgggaaaggtcagccccgcgaagctcgacgcattgcccgccggatgccccggcccctcgtagttggtcaccacgccgacgaatccgatgcggaatccgccctcttcgagcaccgtgtaaggcggcagcggaggaaaggagcaggtgtcgctcactacattggcgcacaccacctcgaaatccatgctgtctatcatccggcccagaaacgcctgcccgtggtcgaattcgtggttaccgagcgtcgccacgtcataccccagcctgttcatcagcgcgatcatcggcatccccggcgtcgccgcccggtctacgtaggcgttgcccgtccagcggtcgccggcatcgaccagcaccaccagctgcgccgtgtcgcggcacgcctcgacggccgccgccagacgcgggaagttccggattttggcgtgcatgtcgttcgtcgacagcaaaacgagcgtccgctcgcggggggcgcaggccgccgcgagcgccgccgtgacgatcagaaccgtgcggagtattctttccataatatcgtttttgagtttgtcaaagttacaaataattcatatctttacacttcattcagcagaaaaacttatggcagacagcatcaaagtcatatgcgacaacctcggaggtccgatccgggtggcgatgggcaccccgctctccgacgtggccgcacagctgacgccgggacgctacccgttcctcgcggcgttcgtgaacaaccgcatcaaggagctcaactacaaaatatataccccggtgacggtccgcttcgtggacatcaccgacttcgcgggcatccgcgtctaccagcgcacctcgtggttcatcctccagaaggccgcacgcacgctctttccgggacatacgctccatatccgccactcgatgggccagagcggcttctactgcgagctcgaagggctcgacgagttcacccacgaacaggccgcagcgctcgaagggcacatgcgcgaagtggtggcgcagaacctccccatcgagcgcaccaaggtgctcacgagcgagctccgcgccatctacgccgaacagggcttcgacgacaagacggcgctgctcgacacccgtccgcggctctacagcgacctgtacacgctggacggcacggccggctacttctacggggcgctggccccctcgacgggctacatcgaccgcttctgcatcgaaccctactacaagggcttctatctggccctgcccctgcggacgaaccccggcgtgctcaacaagaacgtccagcaggagaagatgttcggcatttttcaggagtaccagtcatgggtccggatcatgggcgtccccaccgtgggcgacgtcaattcgaaggtgctcgcgggcgacgccggcggcatgataaaactcgccgaagcgttccacgaacgcaaattcgcatgggtcgccgacaccatctacgacgccaacctctcgcgcggcgtgcgcatcgtgcttatctccggtccctcgtcgagcggcaagaccacctcggccaagcggctgggcatccagctgggcgtgctggggctgaaaccggtgctgatctcgctcgacgactacttcgtggaccgcgaaaagaccccgaaggacgccgacggcgagtatgactacgaagcgctcgaagccatcgacctcgaactgttcaacgaccacctccgccgcctgatgcgcggcgagagcgtcgatattccgcgctacaacttcatcacgggacgccgcatgcagcacaacgacccgctgacgctcgacgagcgttcgatcctgatcgtcgaaggcatccacggactcaatccccgtctcacgccgggcgttcccgaagagcagaagttccgcatctacatctcctgcttcacgtcggtggccatggacaacctctcgcgcatcgccaccaccgacaaccgcctgctgcgccgcctgacgcgcgactaccggcagcggggcgccgacgcgctggccacgctctcgcgctgggcctcggtccgccgcggcgaggagaagcacatcttcccctatcaggagaacgccgacgtcatgctcaactcgtcgctcttctacgagatttcggtcctgcgccccttcgccgagaaaatcctccgcgaagtgcccgacacggtgcccgaatacgacgaagcgcgccgcatgctgaagttcctcgacaacttcatccccattccgcccgacgagattccgcccacctcgatcctgcgcgaattcatcggcggcagcagttttcaatattgagaatcgtccgcacgccccggcgtcacccggacgcaaaccatgcaagacaataaacgaccgcccggttccgacccggccccgaaacgataattccgccgcaccgcggcgccaagtccccataacttcatacaactaacagatatgttcgacaaattttccgaacgccacatcggcgtcagcaacgaaaaggagctcaaagccatgctcgaaacgatcggcgtcaagtcggtcgacgagctgatctcgcaggtcattccgcactccatccggctcaagaaaccgctcgcgctgcccgcggagggcatgagcgagtacgaattcgcaggccacatccgcgcgctggccgagcgcaaccgctgcctgcggtcgttcatcggcatgggctactacccctgcgcggttcccgccgccgtcacgcgcaacgtcttcgagaatcccgcgtggtacacctcctatacgccctatcaggccgagatttcgcagggccgtctcgaagcgctgctgaacttccagaccgccgtgatctcgctcacgggcatggagatcggcaactgctcgctgctggacgaggccaccgccgccgccgaagcgatgctgatgatgttcgccctgcgctcgcgcgaagccgtcaaggagggccgcaaccagctcttcgtcgaccgcaacatcttcccgcagacgctcgacgtgctgctcacccgcagcgaacccttcggcatcgaactgatcgtcgacgaatacgacgaatacagcttcacgggcaaggagttcggcgccatcgtccagtatccggccgccaacggcgccgtgcgcgactacgcggacttcacggccgccgcccacgccaagggcgcgctggtcacggccgtcgccgacctgctggcgctggcgcttctgaaagcccccggcgaatggggcgccgacatcgccgtcggctcgacccagcgtctgggcaccccgatggggctgggcggtccgagcgcgggctacatgaccacgcgcgaagccttcaagcgcaacatgccgggccgcatcatcggcgtctcggtggaccgtctgggcaaccgggcgctgcgcatggcgctccagatgcgcgaacagcacatcaagcgcgagcgcgccacgtcgaacatctgcaccgcctcggcgctgatggcctcgatggtgggcttctactgcgtctacaacggtcccgaagggctgaagcgcgccgccgacacggcccatctggccgccgcgacggttgccaaggcgctcgaagcgatggactacaaactcgccgcaacggcctatttcgacacgctcgaagtcgccgccgaagccgccgtcgtacagtcgctggcgctcgaaagcggcatcaacttcttctacccgaccgaaggttcggtgcgcatgtcgttcgacgaagtcacgactccggaggagatcgccgaggtcatccgcatcttcgccgccgccaaaggcaagaaagccaaggccgtaaagcccgtcaccgaaagcaacgtcccggccggcctgcgccgccgttcggcctacctgaccgaaccggtcttcaacgcctaccgttcggaaagcgccctgatgcgctacatcaaacagctggaactgcgcgacatatcgctggccaactcgatgatctctttaggttcgtgcaccatgaagctcaacgccgcggcgctcatgcagcccctttcgctggccggcttccagaacatgcaccccttcgccccggcggatcaggccgagggttacatgcagttgatcacggagttggaaaacgatctggcgacgatcacgggcttcgcggcctcgtcgctgcagcccaattcgggcgcggcgggcgagtacacggggctgatggtgatccgcgcctaccaccagagccgcggacagggctaccgcaacgttgtgctgatcccggcatcggcccacggcaccaacccagcgtcggccgccatggcgggcatgaagatcgtcaccgtggcgtgcgacgccaacggcaacatcgacgtggaggacctcgaagtcaaggccaaggagtacagttcggagttgtgcggcctgatggtgacctatccctcgacgcacggggtgttcgaaagccgcatccgcgaaatcgtggacgccgtacacgacgcgggcggacaggtctacatggacggcgccaatatgaacgcacaggtgggcctgaccaatccgggctacatcggcgccgacgtctgccacctcaacctgcacaagaccttcgccatgccccacggcggcggcggtccgggcgtgggtccgatctgcgtcgccgagcacctcaaagccttcctcccctcgcattcggttatggcgacgggcggcgacgaaggcatcaccgccgtggcatcggctccttggggctccgcactgctgctgcccataacctacggttatatcaagatgctgggtgaagccggactgcgccgcgccacggaaatggcaatcgtcaacgccaactacatgtccgccgcgctcgcatcggagttcaggacctactattcgggcgagacgggccgcgtgggtcacgagatgatcctcgacctgaccaacttcaagaaggactacaacatcgactgcggcgacatcgcccaccggctgatggactacggattccatgccccgacgctctcgttccccgtgcacgagacgctgatggtcgagccgaccgaatcggagccgaaagccgaaatggaccgcttcatcgaagccctcgtgtcgatcaagcgcgaatgcgaagcggccgtcggacagcccgacaacgtggtggtcaatgcgccccacacggccgtggagatcgcgggcgagtggccgcatccctacacccgtcagcaggcggtcttcccgctcgaatgggtgcgccaagcgaagttcttcccctatgtttcgaagatcgacgccggctacggagaccgcaacctctgctgcaggaattgcgaataaatcgtgaaagccgcgattattaaggaattatatgtaactttgcagcccgtacggcgcggattccgccgctgacggagccgccggccggttcgaaagaacggtcccggcggcaggcgccgcagcgctgcaagccaacgtccggattccggcaggcgcgttttttgccgtatgcggaagtaaccgcatgcagaaaacaagccgtgcagaagcggacaagcccccaaaggcaggcggagcgcggaaacgctccgcgagccaagccccgccggagggaaatgccgggcgggaacgcagaccgggaataacaggcggtagcgcagacccaaacgccgggcggaaatgccggacggaaacgcggagaagggccgcaaggcagaaacgccggcaaaaacggacaagcccccaaaggcagacggagcgcggaaacgttccgcgagccaagcaccgccggagggaatgccgggcggaaatccgggcggcaacgcagaccgggaacaacgggcggaaatacccggcgggaacaacgaaaacgaaaaaaacattttttaacgaattattatgaaagtagaacagaacaaaatggtcggcgtggactacaagctcaccgtcgacggacagatcgcagaccagtcgcgtccgggccagccgctcgaatttatcttcggaacaggcatgctgctccccaaattcgaagaggcgattctgggcaaggaggtcggcgaagccgtctcgtttacccttgagccgaaggacggttacggcgaactgatcgccgacgccgtggtagacctgcccaaaaacatattcatggtggacggcaaactcgccgaggacatcctcttcgtgggttcgcaggttccgatgagcgacaatcagggcaaccgcatgatgggcatcgtcaaggaggtcggcgaggagaccgtgaagatggacttcaaccacccgatggccggcaagacgctcaacttcgacgtcgagatcgtatcggtgcgcgacgtaacgcccgaagacctgcagggcggctgctcgtgcggagactgcggagacgactgcggcggcggttgcgaccacgaaaaagggcactgcgactgccactgacagaaaagcgggacttgcagaagccccgctttttttaaaaccccgaaaccgactctgccatgacccagaccgaactgctgaaaatgatcggcagcggcgccgtacgagacctcgacctgacgggccgcgaattgaagaacatcgatttcaaaggctgccgtgtggaaaacgtgacattcgacgaatgcacgctcacggagtgcaatttcgacggctgcgggatggagcgcgtctccttccgcaaggccgtgctgcgcaactgccgtttccgcagggcgaagatcgcatggagcgacttccgctactgcgagatcgaaagggccactttcgaagaggccgaaatccggttctgcgacctttaccgcgccatgctcaccggaatcgtcatcatgcgcaaggctcggatcggagagacgagcctctactacgcctacttcggcgaaggggtgaacatacgccgcgaaaacatcgccgacggcaggctgctccagcaggacctcgacgcctacaggcggtttctgatcgaatggaacacctccggcacgggagtccgccggaacgaccgcgccgagcagtcggcgtggagccccgatgcagcgctgcacgctggtggacatgctcaacgtcgtccagacgacgatcggcatcctgctcacgggcatcttcggcttcatcctcggcaacaagatacgcaatcagtaaagccgtgttcacactgcgccaatacctgaccacgctggccgatacgcacggcctcacccggacgctgggcgagatcgaggtgtgccgcgacggaaaggggcgcatatgctactcggcaggcaacagcgccgtcgtattccgcatccgctgcgaaggccgcgtccgctcgctgcgctgttacatgcaccatccgcgccatctggcggaaatctacggcgagaaactgctgccgcaggagcttttcatctacacctcgcccgcaggcggcgtctgggtggatgtggtgctgagcgactggatcgaaggcgtgacgcttcacgaagcggtcgccgcagccgccgaggcgggcgacacggcgcgactgaggagattcgccgccgcattcgaccgcatggccgcggcgctcacggcggacgactgggcgcacggcgacctgaaacccgaaaacatcgtcgcggacaaccggggacggctccacctgatcgatttcgacgccatgtttctgcccgccttcgcaggtcggcacagcccggagctgggcacggcggctttccagcatcccgcgcgcacggtgcgggatttcgacgcttcgctcgacgactatccggcggccctgatctccacggcgctgcatgcgctggcgctcgacccgacgctgtacgcccgctattccgatgccgacgggctgctcttcacgccgcagaagatcgggaccgacgcggcgctctgcgaggtgctcgcgctcttcgagcgcaggggactcgcggcgcagtaccggattgcacggttgctccgttcgccttcgctccggctgccgggactgccgcaactgctcgcactggcggcggaaacaacggaaacggatgaaataacgggacctgaggaaacgaagaatgcagtgaatacggcaacgacagggacaaccggaaccggggaaacagccggaacaacaggcccaaagcgggcaatgggagcggaagaaacggcaggcggaaattccggctcggcagaaggcccagcgggcgactcggcagacggcacaacagaggacccaacggacggcgccgtcgccgaagcggccgagcttttcgtcgaaaacggcctgtggggctaccgcacgccggaacaggtcgtcgtgccgccgctctacgactgcggattcgacttcaccgaagggctggcggcggtacggctcggagcgacatggcactatatcgacggcgcgggccggacccggatcagctgtccggggtgcgaagccgtgaagccgttccgcaacggacgcgccccggtcgtccgcggcggaaggcggctggagatcgaccgggagggccgcgagtttgatatttagccttaaatcgttatatttgcatttgcttaatacgacaccgatgcctcaactcagatatatgactccggcggagatttccgccgccgaatccctcggatcttcggccgaagcatggtcgcaggtgagggtctccgaagatttcacgcccttccaactgctgcaaagccatctggaggggacggtcgagatcggctccggcgcgcgcatcatccgatcgcgcgtatgcaactaccggatcggcgagggcgcgctcatagagggcgtcacggctctcgaatgccgccgccggagcacgttcggcaacggcgtgggcgtagcgacgatgaacgagtgcgggggccgcacggtcaggatattcgaccggatgtcggcgcagatagcctatctgatggccgtctaccgccaccggccgcagaccgttgcagcgctggagcgcatggtggaggcctatgccgaagcgggtgcgtcggagatgggcagcgtaggccgcaacacccgcatcgtaggcgcgaaattcatccgcgaagtccgcatcggcgacgaagtgtgcatcgacggggcctcgatgctcgaaaacggcaccgtctgcgacggggcgcatatcggcgtggacgtcaaggcctacgacttcatcgccgccgagaaggcgcacatcgacaacgggtcgatcgtcgaacgctgcttcgtgggcgagagctgccggctggacaaggccttcacggcagccgagtcgctctttttcgcaaactcgcactgcgaaaacggggaggcggcctcgatcttcgcgggtccctacaccgtctcgcaccacaaatcgtcgctgctgatcgccggcatgttctcgttcttcaacgccgggagcggctccaaccagagcaaccacctcttcaagagcggcgccgtacaccagtcggtgcatctgcgcggctgcaagttcgccagcggggcctacatcatgtcgccggcgctcgaaggggccttcacgatgatcatgggacaccactcgtaccaccacgacacgtcggcgtttccctactcctacctgatcgagaaggagggccgcacgacgctcatgccgggcgcgaacctcaccagctacggcgccgtgcgcgacatcgagaagtggccggcgcgcgaccgccgcgaacgcaaacgcgacgtcatcaacttcgaagaatacaacccttacataaccgaagcgatgctcagggccgtggacacgctccacacgctggccgaagaggaccccgacgcgccgtcgtacgtctaccgcaaggcggtcatccgcgccgcggccctcaaacggggcatcggactttacaacaaattcgtcgtcgcggcgctgggcgccatgctcgaccgcggcgaatcggcctcacgctacgacggcagtggccgctggctcgacgtggcggggcagtacgtcaccaaacgcgaggtcgaagcgatcctcgacgccgtggaccgcggcgagctgacaacgcccgaagaggtggacaaccgtttcagggtctttttcgtgcattacgacgactacgcccacagctgggccgaagggatttacgcctcgctgctggggcgcgtgcccaccgcggcagagatcggcgacgcgatcgaggcggggcgcaacgcaagggaggcgatgcgccgcacgaccgacgccgaccgcgagcgcgactgttcgctcgacatggccgtcagctacggtctggacagcgacgacgagcgcgaagtacgcgacgactattactcggtccggggattaaaatagacgcaacatgtatacacaaagcatcacacgcaaccaccgcacggcattcatactggccatagactgttcgggatcgatggccgaaagcatcctcttccggggacgcaggctcaccaaggccgaggcggtggcaggcatcaccaacgacctgctcttcgagctggtagaacgcgcccgccgcagcgacggcatacgcgactattacgacatcgccgtgatcggctattcgggcgacgacgaggtgcgctcgctgctgcccgacggcgaagagctggtgccggtgagcgccctcgcggcgcgggagatgccggtgcgtacggaggtgatcgaacaccgtcttcccgacggcagcatcgccctgcgcgagattcccgcaccgtcgtggatcgagtcgcaggcggcaggacagacgcccatgtgcgaagcgctgcgccgggtgcgcgacatcgccgccgaatggaccgcacgcgcggccaacgccgagagtttcccgcccgtggtgttcaacatcaccgacggcgaggcgaccgactgcgacgacgaggagctgcgtgcggtatgcaaccagatcaaggcgctggagaccgccgacggcaacgtgctgctgataaacatccacatcgccgcaggcgacgccgggcggcacgtattctttcccgaagcccacgaagccaactacacgaaccgctatgcggcgctgctgtacgactgttcgagcgaaatgccggcggtattcaacgaagccatacgcgaagccaaaggccccggcgcggtgcccccgttccggggcatgagctacaacgcatcggcggcccagctggtcaccatgctcaacataggttccatcagcgtcaaaaccgaatagccatgacagcgaccatccaacacttcacccgtgcgctgctgacgcccgacctgtcgctggcgacgctctccgacgcccgcgccgtcaccgactgcaacggcatgccgcgcatggtacgcaccacgcggttcgccgaagccgaaatcgaatggcgcggcgagcggtggctcgccgccatgcccctgacgcctgcagcactgccccgcatcgaacgcacggcttcggtcctgcggcgcatgaacaccgaacacctgacgcaattccgcattctgccggaggaaatgcgctggaccgacgcgctgggcaacgagcggcgcacgggactcgtcctgcagcagcttccgggccgggaattcgccgaggcgctgctcacggaggacaaaacggttctgctcgcggcgctcgacacgctgcgcgaagccctgcgggagctggaattcacgcacaacaacctccgggaaagcaacctccgctggcaccggggacgaatcataccgatccgttattacgacgcccgcataggcgcggcggaaaacggcggggccgatgcggaggcgttcgaggccctgaaacgccggatcgccgaggcgcccatgccccggcagtcggtaaacgacgtcgaagcggtctacaatccggtgcggaagctgaccgggcaccgctggacgagccacgtattcgaagggctggtatgcgtcgaggacgaaggcggattcggattcgtcgatacggacaacaacccggtgattccgtcgcagttcctctgggcgggcgacttccacgaaggccgcgccgaggttcagacgcggaccggcatgggactgatcgaccgcgaaggaggctacgtcatcccgcccgaatacgaaatcgtcgattacgacccggcggtcagcatcgtgcacgtccgccacggcggacgctgggcgctgttcgactatctgggccgccgtctgacggagttcggccgggaggatatgcaggagcctgtccggcaggagccgtgcaggtccgaaatttgcagataacaacgtcacaaaacatacgacaatggaagaaacgatcaaatgcctgattatcggcagcggccccgcagggtacaccgcagctatctatacttcgcgcgccaacctccggcccgtactctacgagggtatcgagccgggcgggcagctcacgaccacgaccgacgtggagaattttccgggctatcccgacggcgtcagcggccagcagatgatggccgacatgcgccgtcaggccgaacgcttcggagccgacatccgcatcggaaccgtgacgagcgtggacctctcgtcgcgtccgttccacgtggtgatcgacggcacgacgcagatcaaggccgagacgctcatcatcgccacgggagcatcggcaaaatacctcggcctgccttcggaaacgaaattccgcggcatgggcgtcagcgcgtgcgccacgtgcgacggattcttctaccgcaagaaggacgtggccgtggtcggcggcggcgacacggcctgcgaggaggccacctatctggcctcgatctgccgcaaggtctacatgatcgtgcgcaagccccacctgcgcgcttcgaaggccatgcaggagcgggtgttcaacaccaccaatatcgaagtgatgttcaaccacaacaccgccgaggtgctgggcgacgaatcgggcgtgacgggcgcgctgctgcgctgcaacgacggcaaggaggtcaggatcgacatagcgggattcttcctcgccatcggccaccatcccaatacggagcttttcgccgaccagctgacgctcgacgcggaagggtacatcaaaacggaagcgggcacctcgaagaccaatatcgaaggggtctttgccgcgggcgacgtgcgcgacccgcattaccggcaggccataacggccgcggcgtcgggctgcatcgcggcgatcgactgcgaacgcttcatcctgaaccgcgcagagtaaaccgaatcacgcagagcgaacaaaaacaggcaccccgcatgagtttcagcgtcaccatactcggatcgtcctccgccaagcccactctgagccgccatccgtcggcccaagcggtcaatgtgcacgagcagtactatctggtcgatgcgggcgagggagtgcagcagcagctgatccgctgcgggatcaccccgctgaaactgcgcgccgtgttcatctcgcacctgcacggcgaccatgtcttcggactctttccgctgatctcgacgctggcgctctacgggcgcaaaaccccgctgcgggtattcgccccggcgcctttcggcgagatactggcctgccacctgcggttttttgacagcgagctgccctatccggtggtctggaccgaggtggacacgaccaagcacgcgctgctgctggaaaaccgcacgctcgaagtgtggagcattccgctgcgccaccgggtgccgacggcgggattcctcttccgcgagaaggagccgccgctgaacgtcgagaagttcaagatcgcgaaatacggccttacggtcgcgcagatcaccgccgccaagcggggcgaggagatcgcgctcccgacgggcgaggtcatacccaacgcggagctgacctaccgcccctatgcgccccggtcgtacgcctacctctcggacaccaacttctcggcgaaggccgcgacgctggccaagggcgcggacctgatgtaccacgaggcgacctacgccgccgccgaacagaaaacggccaaggagcggggccactcgacaagcgccgacgcggccaaagccgccctaaaggccggagccaagcggctgataatcggacactattcgtcccgctacaagaacgaaaacatattggtcgaagaggcccgcgcgatcttcccggagacctatccggccaccgaaggcgtcaccttcaccatagagaaacaacgatgacgaaagccgaaatacaactcgtccgcgcgctggccgacaaacgcggacgcacggaacacggactgttcgtggccgaaggggagaaactcatcggcgaactgcgcggctcgcacctgaaggtccgcaagatcttcgcgctggagggcgtgttcgcagggccggaggtcgagaccgtcgccccgcgcgacatggagcggctgtcgctgctcaaaaccgccgccaactcgctggcaatcgtcgagacgccccgctacgggctggacatgcggtcgctcgcggggcggctgacgctggcgctcgacgacgtgcagaaccccggcaacctcggcacgatcgtccggctggccgactggttcggcatcgccgacatcgtctgctcggaggcttcggccgactgcttcaacccgaaggtcgtgcaggccacgatgggcgcgattctgcgggtgcgggttcactacaccgatctgggagcgtttctgcacgacgcgggagccgccgggctgcccgtttacggcacgtttctggaaggggagaatatctacggcacgacgcttacggaagagggcgtcgtcgtcatgggcaacgaaggccgcggcatctcgcaggccgcggcgcgcgccgtgacgcacaagctcttcatcccgccctaccccgccgaccgccgcgggtcggagtcgctcaacgtggcgatggccacgggcatcgtatgctcggaattccggcgtcgggcaggcatgggaagcgggaaataggcccgccgcaccacaaataaaagactgccgggattgctcccggcagttattttttttgcgacatccggcaaggcccgcggcgcgggaaccgactgcggcacaagggaggttcggcaaaggcaggcgcgacgcaaagcagattcagcacaaggcaggtcggcacaaggcaggtcggcacaaggcagattagacacaagtccggcgcaacgcaaaaccgattcagcgcatgccgcccggcggcaaaccgataacaaaccgcgaacaaaccgacaaagccccgcaacagacaggcgccggcaaaaggctcagcccacggcaacggcggcatgctcctgcacgatggcggcgatccgccgcacctgcgccagcgcttcggcacactgccagcgggagaaaagcgcctccgattcgagccggcctatggtctgcacgagccggccgacggcctgcaagagcgtctgcagttcgccgggcgaggccgagcgcaagtcggtggcggccagcagcacggcagtctcccggccgcggcgttcgaactccgaaagcgccgcattgctccggcgccggtcgtagggagccacccataatatttcgaacatcagccggaaaaccgtatcgaccagttccggattgtgttttttagtcgtcttttgtgcgcaaggttccatctttcgggcggtttatcgaaaaaagcgcgggcagtatcaccgaatccaccatcgaggtattggacgacctgtaacgtagaatacggtaaatgcccacgccgaaaacagcgagagcatcaacctttgttccttacgttacgcgaaagtgtccaattttcgacggtaagaaaaaagccgatgcgctttaatccgaatatgtcatcagccctaacaggctgcataaaacaaaggtaggaaaaaatagtccatccgcaaaacattacggatcgccgcagtgcaaaaaaacattttaattgcatccggcctattgcagattctgaataatatgtatctttgtagattgaaatacttgtatccatgtcagaacagaaacttaaaataggcatcacgcagggcgacacgaacggcatcggctgggaggtcatcctcaaggcgctggccgatccgcgcatgacggagcttttcacgcccgtcgtatacggctcgcccaaggccgcggcctattaccgaaatacgctcgcacagaccgaaccggtgcagttcaacgccgtaacgtcggcccgcgacgcccgccgcggcaaagtgaacctcgtcgcatgcggcgacacggagcagatcgaaccgggcaaagcttcggccgaggccgggcgcgccgccgtcgaggcgctgcgccgcgcgacgcaggagctgaaggaggggctgctcgacgccatcgtcacagcccccttcaacaaggagagcgtgcagggcgacgggttccacttcacgggccataccgaattcatcggggccgaactgggcggggagccgatgatgatcatgtgcagcgagattctgcgcgtggggctggtcaccaagcacattccggtgtcggagatcagcggcagcatcaccggggagaagatcgtgcgcgacctgcatacgctccgccgcacgctgaaagaggacttcggcatcgtcgagccgcgcatcgccgtgatggctctcaacccgcatgccggggacggaggactgctgggacgcgaggagcaggagatcatccgcccggccgtcgtcgaggcgttcaatcagggcgtgctggcgttcgggccgtttgccgccgacgggcttttcgcaggcggaggatacgcaaaatacgacggcatactggccatgtaccacgatcaggggctggcgccgttcaagacgctttcgcccgacggcgtgaacttcacggccggactctcgaaggtccgcacctcgcccgaccacggcacggcctacgacatcgccgggcaggacaaagccgacccgcagtcgatgcgctcggcgatttacgccgcgatcgacatcgtcgagcaccgccgcgcatgggccgaatggagccgcaacccgctgcaacgcgccgaacgcgagaagggcggccgcgacgtctcggtcaaggacctgccgcagaccgaaaaggaggattagcgcaggagcgacgaaaaaccgggatctgggccggaggaagaggaagaggaagagcaagagcaagagcaagagcaagaggaagagcaaacgacatccgccgtatccgcccaaagattgcgggcagggcgcagcaagaacagaaacagcaaaccgggcaaaccggaggcgtattccgtctcgtaattgtggaagcgccgaaggccccgaaaacttaatttatattttatgatcaaaatcacttttcccgacggctcggtcagagaatacgccgaagggactactgcttaccagatcgcagagagtatcagccctcgtttagctgccgactctcttgccgcttcggtaaacggcgcgacggtagacatgacgcgcccgatcggggaggacgcctcggtcaaattctacaaatgggacgacgaagagggcaagcacgccttctggcacacctcgtcgcacctgctggccgaagccctcgaagccctctatccgggcatcaagttcggcatcggccccgctatcgaaaacggcttctactacgacgtcgattcgccgacgccgatcaccgaggccgaccttccgaagatcgaacagaagatgcaggagctgtcccgcaacaaggagcagctcgtccgccgcgaggtccccaaggccgaagcgctcaagaccttcaccgagaagggcgaccagtacaaggtcgaactgatctcggacctgcaggacggaaccatctcattctataccaacggtgcgttcaccgacctctgccggggtccgcacatccccaacacgggttacatcaaggccctcaagctgacttcggtggcaggtgcctactggcgcggcaacgagaagaacaagatgctgacgcgcatctacggcatctcgttccccaagaagtcgatgctcgacgaatacctcgtgatgatggaggaggccaagaaacgcgaccaccgcaagctgggcaaggacctcgaactgttctgtttctcgcagcgcgtgggacagggtctgcccttgtggctgccgaaaggcgccgcactgcgcgaccggctggagcagttcctgcgcaacgtgcagaaggagtacggctaccagcaggtcatcaccccgcatatcggcaacaaggagctgtacgtgacttcgggacactacgccaagtacggcaaggattcgttccagccgattcacaccccgatcgagggcgaggagtatctcctgaagccgatgaactgcccgcaccactgcgagatttaccgttcgaagccgcgttcgtacaaggagctgcccgtccggctggcggaattcggcaccgtgtaccgctacgagcagtcgggcgaactgcacggactgacccgcgtccgcggattcacgcaggacgacgcccacctgttcgtacgccccgaccagctgctcgaagagttcgagcgggtgatcgacatcgtgctctacatcttcaagacgctgaagttcgacaactatacggcacagatttcgctgcgcgaccccaacaacaaggagaagtacatcggctcggacgaaaactgggagaaggccgaaagcgccatcatgcaggccgccgaggagaagggactcaatacggtcgtggagtatggcgaagccgcgttctacggtcccaagctcgacttcatggtcaaggacgccatcggccgcaagtggcaactgggaaccattcaggtggactacaacctgccggagcggttcgacctgacgtacaagggcgcggacgacaaactgcaccgcccgatcatgattcaccgcgcgccgttcggctcgatggagcgtttcgtggccgtactgctggagcatacgggcggcaagttcccgttgtggctctcgccccagcaggtcgtggtgctccccatttcggagaagttcaacgactacgccctgcaggtcgcggagtacctcaaccgcagcgacgtgaggaccgaggtggacgaccgcaacgagaaaatcggccgcaagatccgcgacaacgaactcaagcgcatcccctacctgctgatcgtcggcgagaaggaggaggccgaaggactcgtgtcggtacgcgcgcagggcgaaggcgacaagggtcagatgacgctcgaaggcttccgcgacttcatcgccggaatggtgaaggaggagatcgaggctaacaaaatggaaaagaaataacgactccggtccgcatccgggacttcccctttcgggggaaattccggacggcggggtttacggcacgccgcaggtcacgccccggcagccggacaatgaaaaacaaaagtaattaaccactttaatactttacgattatcgcagcaccgaaaccattcccgccgaggccattcaaccccgggaataaccggccgaaaccggcagccggcaccaacaaccggtacgggcgccgcccgcccgaaaaggagaatccgcaccgcatcaacgagcagataacggctcccgaagtgcgcgtcgtgggcgacaacgtcgaacaaccgctggttttacccatacgcgaagcgctgaagctcgccgacagcatggaactcgacctgatcgagatctcgcccaaggccgagccgcccgtatgccgcatcgccgattaccagaaattcctctaccagcagaagaaaaaggccaaggagctgaaagccaatcaggtgaaagtcgtgatcaaggagatccgcttcggtccgcagaccgacgaccacgactacaacttcaagctcaagcacgccaccaacttcctgaaggaggggtgcaaggtcaaggcgtacgtcttcttccgcggccgttcgatcgtcttcaaggagcagggcgaaatcctgctgctccgcttcgccaccgacctcgaagaggtcgccaaagtggagatgatgcccaagctcgacggcaagaagatgaacatgatgctggcgcccaaaaccaacaagaagtagcggcggagcggttccgacaccgcgcgaagcgactatatccgatccataatcggggtcccggaagggagtccgattgtggatttttatttcatgaccgacgcaagcggcagagaggcggcggcctttcacacacctgcggaagcggacctgcaggcatgcacctgcgggaacgagctttcagggacgggctttcgggaacgggctttcgggaacgacgcgggggacagactttcggaagcgctacgcagggaaccgccctgccggacttattccgtccgcagaaaagggattttgccgaatttcgaaatatatttacctttgcaatgaaatgattacgcaggacgacatattcgggatcacggacgacgcggcgttcgaagccgccgcactggaggtattcaggcggcaggcggccgaatgcccgccctatcgcgagtatctcgcgctagccggagtgcagcccgaagaggtgcgagcggcccgcgaaattccgttcctgccgatcgaaatcttcaagacccacgacgtctactgcggcggcacggagccggaggcggtcttcacctcgtcggcaacaacgggcatgacgccgtcgcgccacccgatgcgctcgctggcgctttacgaacggacgttccgcgcagcattccgcacgttctacggcgaaccggggcagtggagcctctatgccttgctgcccaattacctgcgccgcaaggggtcgtcgctggtctacatggccgaccggctgatcgccgactgcggttcgggcggcttctacttggacgactacgacgcgctgctgacggccatgcaggccgatccgaagcccaaaatcctgctgggcgtaagctatgcactgtgggatctggcggagcgttacgccccgaagctcgaaaatacggtcataatggagacgggcggcatgaagggttaccgcgaagagattcccaaggaggagttccacaaaatcctgtgcggcgcattcggcgtcggcgcgatacactccgaatacggcatggccgagctgacttcgcaggcctattcgcagggcggcaacctcttccgctgtccgccgtggatgcgcgtcacgacccgcgacgtgaacgatccgttcgatccgcagcccgcgggaacgcgcggagggctgaacatcgccgatctggcgaactggtggtcgtgcgcgttcatccagacgcaggacgtgggccgggtcgatgcccgcggagcgttcgtcgtcgaggggcgcatcgaccacagcgacatcagaggatgcaacttactggtacagtgaacctaaacgggtttccgccgcaaggcgggcaggccccgatataaaaccgaattatgaaaacagcagcattcgtccccatacggctcaacagccagcgcgtcagcggcaagaacctgcgtccgctgagcgggtcgccgctcatgtgccacatactccgaacgctgaccgaggtcgaaggaatcgacgaggtttacgtctattgcagcgacgagcggatccgcgaattcctgcccgaaggggtgcggttcctgcgccgcagcgaggagctggaccgcgacacgacgctgggacgggagatttacgacagcttcaccgccgaggtcgaagccgacctctatgtgctggcgcacgccacgtcgccctttatccgcgccgagaccgtcgcggatgcgctccggaaagtggtttcgggcgaatacgactcggcattcagcgccgaaaagatacagacgttcgcatggtacgaggggcggccgctcaactattcgcccgaaaacatcccccgcacgcagaccatcgagccggtgtatatcgaaaccagcgcgttcttcatcttcccgcgggccttgtggaccgggcggcaccgcaggatcggcgacaggccctacatggcggtagtggaccgcatcgaggggctggacatcgactatccggaggatttcacgatggccgagatcatcgccgcaagccgcaacctgcccaaataaattccggcgcatctaccggcacatcaggcgatacgaagaaggagaaatttcgattcctcctttttcgttttcatcgggcagctcactccgggttccgttcgtaggcgtcgatcatcgaaccgcgggtgcggttgacgatccgcgcaccgagcgcggcggcatagtcgcgcaggacttcgtggccgcggaacagttcggcgacttcggccagatagtccgccatcgtatagggcacatggggaaccttcttgtaaataggctgcggcgcggcggcttccgctccgtcgtaatagtggcggtcgatgcggcagagccggttcccatcgtccacgcagagtccgtccaacagcgtatggtccacgccgtaaagctcgatccgcttataccccagcagcagagcgacgtattcgccgacctgcaccaccgttccgaaattggcgcttcccagcccgcggcggaaaagccaaaattcgagacttctgaaaccgcggtacatctgggtatggaagcggacgatgcggatattggaattgggcagcgcggcgcggtagtcgaagccttcggggttatagtactgcacgtagaggttcatcggccacgcaaccttgcgggcgagcgtcgcgtaaagcgcccggacgcggtcgcggcatgcgctgtcacggaagaacatcgggtcggaaaggacgtaatacttcggcttcacgacctcgaagcggtcgtcttcggcgaaaaaattgacagcaaggaaatcttcggtttcgtattcgcggcgttcgatcagccgcggcaggtcaccggccagcgaggggccgttgcccagaatcaccatcgactgcgccggccggccgaccgttccggcacgcccgacgtagttgcggaaattctccttgactgccatcacggcgaaatacaacgccgtgtcgaacgagttgcggatgaaagcgatgagtttctcggctgcggtcatagtgcgttattcgttaattcccgtccggaacgggaagagcggaacgggagcggcgggagggactccgcgcgcatagggccggccggtttcagcccggaaggtcgcctgaagagtgccgcgcacccgttaattatttgcaaatgtagcaaaagatcggtatcttcgcaataaatcaaaccgctaaaaatggcatccgcaaccatctcggtcatcatacccctctacaacaaggaacgcgaaatcggcgacaccctgcgttcggtgctagcccagacgctgcccccggcagagatcgtcgtcgtggacgacggttcgacggaccgcagcgcagaaatcgtgcgcggcatccgctcgccgctcgtgaaactcgtcacgcagcccaacgccggcgaatgcgcggcccgcaaccgcgccatcgccgaatcgacgggcgactacatcgccctgctggacgccgacgacacgtgggagccgggatttctggaggagatcgccgcgatgatcgcggagtttccgggctgcggggtctactcgacggccttcaacatcgtcagccacgacgggcgtttcccggcccgcaccccttcggaacgcggtgtggtcgccaacttcttccgcgactcggcgcaccggtacatctcgatcccgtcggccagcgcagtaccgcgcgcggtcttcgaggcggtgggcggattccccgaagggatgaagatcggcggcgacatgtatatgtggatcaagatcgcccgccgctacgcggtctgcttctcgcccaagccgctggcgaactactcgaaggtcgcatcgaaccgctcggcgtcgagctacacgcccgaacggacgcgctattcgttcgaggaactttacgacccgtcggcgcctgaggaatacaacgaattcgtggcccgcgcggcattgggcaaagcgctcatcatcagcgccaagggcggcacaaaagaggcggcgcgcgcggcggagtttttcggctacaccaagacctaccgccgcacgctgcgcaaggtccgcgtcctcaacgccctgccccgcagctggcgcgctccgctgatcgggctatacaacagtctggcatggcgcatcgcccgcaagggtctgtaaatcgaatactgctgaaaatgagacacctgctgaaatccgccgcggcaaagggttttcttcttacggcccttctgctcttcgcggcaagcatctgccgggcgcagtccgtggcgccggagaccccggattacatcctgcgttcgggcggcatggagcgcacctacaaactgcacctgcccgccggcctgccggagaacgccccgctggtcgtcgtcctgcacggctacggcggcaacaacaatcccgaccgtttcgccatgaacgccacggccgaccgccacggtttcgccgtctgctacccgcagggcgcgaaagacggacgcggcaagagctgctggaacgtgggatacccctttcaggccgacatgaccgtcgacgacgtgcggttcctgaccgagctggtgcgccatttgcagaaaaagcacggactgagccggcacaacgtcttctgcacgggcatgtcgaacggcggagagatgtgttaccagctggcggcgcagcgtccccgcctgttcgccgccgtggcgccggtttcgggactgatgctcgactggctctacaaagcggaccggagtacggcgccggttccgctcttcgaaatccacggcacggaggacaagacctcggcatggctgggcgatccgcagaacaaaggcggctggggagcttatctgcccgtgccgctggccgtacattactgggcggcgaagaaccgctgcaccgtcatgcagaccgacacgctgccggcaaaggcccccggcggccgcacggtgatcgcgcaccgcttcacgggcggcgctgggggaagcgaggtgtggctttacgaaatcgtcggcggcaaacacgcgtggggcgagcaggacatcgacacgggcgaggagctgtggaaattcttcagcaggttcgtaaagtaggcggaacgtctcccgcagggccgaaagaggagtgctccgaacgcgggcggcaataaaaaatggttccggaaaaatccggaaccatttcgttttcaggaagcggcgcatccgagaccccgctccggcggtcttgcggccgctctcagttggcgaaggtcaggcccttgtcgtcggcgccgatcttgatcggtttttcgcggttgacgtcgccggccagaatccgtttcgagagttcgttgacgatgtaacgctggatcgtacgtttgaccggacgcgcgccgtagagcgggtcgtagccggcggcggcgatccattcgcgcgccttgtcgctgtattcgaggcggatgccggtctcggccagcatccggcgcacggcgcccagctggatgtccacgatgcgctcgatatcccggcgcgtcagcggctcgaacatcacgatctcgtcgatacggttcaggaattcgggcttcagctgctgtttcaaaaggtcgatgacgtccatccgggtcttctcgaccacttcgggcgcgagcttctcgccgctgaacgccgccgcgaaattctcctgaatgatatgcgatcccatgttcgaagtcatgatgatgatcgtattgcggaagtccaccgtgcggcccttattgtcggtcagacggccgtcgtcgagcacctgcaggagaatgttgaagacgtcggggtgcgctttctcgatctcgtcgagcagcacgaccgaatagggcttgcggcgcacggcttcggtgagctggccgccctcgtcgtaaccgacgtatcccggaggcgctcccaccagacgcgacacgctgtggcgctcctgatactcgctcatgtcgatacgcgtcatcatcgagtcgtcgttgaagaggaactcggccagcgctttggccagctcggtcttgccgacgcccgtggtgccgaggaagatgaacgagccgatcggcttgcgggggtcgttcaacccggcgcgcgaacggcgcacggcgtcggaaatggcggcgatggcctgctcctgaccgatgacgcgccggtgcagctcgtcctccatgtgcagcagtttctcgcgttcggaagccagcatgcgcgtcacggggatacccgtccagcgcgacaccacctcggcgacgtcctgcgcatcgacctcttccttgatcatcgagccgttggccgacgccagcttgtactcctcctgaaaggcggcgatctccttttcggcctcctgaatcttgccgtagcggatttcggccaccttgccgtagtcgccctgccgctcggcctgctgggcctcgatcttcagctgctcgatccggtccttgttctcctgaatcctcttcagcagatcgcgctggccctgccatttggcacgcatctcggcgtctctggacttcagttcctcgatctccttggtgagctgctccacacgctccctgtccttctcgcggcggatcgcctcgcgctcgatttcgagctggcgcacacgccggtcgagggtgtcgatctcctcaggcacggagttcatctccagacgcaggcgcgaagccgcctcgtccacgaggtcgatcgccttgtcgggcaggaaacgcgaggtgatgtagcgcgtcgaaagttcgacggcggcgacgatcgcctcgtccttgatgcggacctgatggtggttctcgtaacggtctttcagtccgcggaggatcgaaatggcgtcttcctgcgtcggctcgtcgaccatcaccttctggaaacggcgttcgagggccttgtcctgctcgaagtatttctgatactcgtcgagcgtcgtggcgccgatggtccgcaggtcgccgcgcgcaagcgcgggtttgaggatattggcggcgtccatcgcgcccgacgacttgccggcgccgacgagggtgtggatctcgtcgatgaacagcagtatttcgccttcgctggcgacgacctcctgcacgacggccttgagccgctcctcgaactcgccctgatacttggcgcccgcgataagggcgcccatgtcgagcgagtagatcaccttcgatttcaggttttcgggcacgtcgccgtccacgatacggtgggcgatgccctcggcgatggcagtcttgcccacgccggcttcgccgaccagaatcgggttgttcttggtgcggcgcgagagaatctgcaacacgcgccggatctcctcgtcgcggccgatcaccgggtcgagcttgcccgaacgggcctgttcgttgaggttgacggcgtacttgcccagcgcgtcgaactgctgttcggaggtctgcgaatcgaccgtcgcacccttgcggaagatacggatcgcttcgagaagctccttctcggtggcgccgctgcgcttgaggatgtcggccgcctgtccgcgttcggccacgagccccagcagaaggtgttcgaccgaagcatatttgtcgccgaagttcttggtgaagtccacggcgcgctggatcaccttcgaggtttcctgcgcaaagaactgctcgccgccgccctcgacccgcggcagggagccgacggcgcgctgggtttcgtcgcgcagtccgcgcacgttcacgccgacgcgtcccagcaggaacgtggccagcgaatcgtcctcgcggatcagcaccgcgagcagatggagcggctcgacagcctgctgtccgcgctcccgcgcaaggttgagcgctgcctgcaacgcctcctgcgccttgatggtcaaagtgtttatattcataatcgcaaagttaaatttcacacggtccgatggttcgcgtccggggccgcaacccgcggcttaccgccgcgcatgcaagtccgactccccctcaaatccccgcccggcggggactcgtcgcattgcgaccggatcgcagacgcaaaccattcgtcatcaacatccgcaaaacacctgccaacctcatttttcggtcattgtgtcatgttttgtcacaacacgctgtcaaaatgcgccaatttggcgcaacggcggacgggcgcgcagggacggcggaggggacaatttttaatcccgaattttcaaatcttcgctcatatttcttatctttgcggaactatgagtgattttatcgtcagcgcacgcaaataccgccccgcgaccttcgcctcggtcgtcgggcagaaacatattacctcgacgctcaaaaacgccatcgagcgcgcccagctggcccatgcctacctcttctgcggtccccgcggcgtgggaaagaccacctgcgcccgcatctttgcaaaggccatcaactgcctgagccccaacggcgcagaagcctgcaacgagtgcgaatcgtgccgctcgttcaacgagggccgctcgctgaacatccacgagctggacgccgcatcgaacaactcggtggaggacatccgcacgctgatcgagcaggtgcgcatcatcccgcaggtgggccgttactcggtattcatcatcgacgaggtccacatgctctcggccgcagccttcaacgccttcctcaagacgctcgaagagccgcccgcacacgccatcttcatcctcgcgacgaccgagaaacacaagatcattccgaccatcctctcgcggtgccagatttacgacttcaaccgcatccgcgtcgaggacagcgtcgaatacctcaaatacatcgccgggcaggagaacatctcggccgacgaagagtcgctgaacctcatcgcgcagaaagccgacggcggcatgcgcgacgccctgtcgatgttcgacaaggccgtgtcgttctgcggcacgacgctcgactaccgcaacgtggcccagacgctcaacgtgctggattacgacacctatttcagcgttacggagatgctgctcgcaggcaactacgtcgatgtgctggtcacgttcgacacggtgctctcgaaaggcttttcggggcagaccttcacggcgggactcaaccgccacatgcgcgacctgctgatggccaagcgccccgaaacgctgcggctgatcgaaatgaccggaacgctgctcgaacgataccggacgcaggcgggcgcctgcaatgtcgagttcctgttcggagccatctccattctgacggagctcgacgggaagatccggcaatcgtcgaaccagcgattgctcgtcgagctgggcctgatgaagatcgcaggactcggccaaaaaaaaaatgacgatctgacctcctccggggagtattccctccccgccctctcaccccgtacggccgcaggcgcggcggcgactccgacggctgcggcacgacccgcgccgcagcagagcgcgtctacagttcaggcgcagacagtttccgcggcagggcaagcgacgccgggtacgccccagccgggtgcgggagcaacggtgcaggccgcagttcggccggaagcaggacaaaccgcggttcgaccggacgcaggacaggccgcagctccaccggcggcaggacaaacggcaccgtccgcagttcagccgggagcagaacaaacggggcaaggctctgtacggccggaagcaggaccggcggcatcggccggcataccgcaggtatccggattttccgtacgcggagctacgatgcagacggcgggtccgcaggcagcggaagtttccgctcaggacaacgctccgcaggctgcggcagccggacaaacgataccgggcggagcggcgaatcccgcggcgcaaggaggaatggcgaatccggcgatgcagagcgggacaccaaacccgaccgcgcagggaggagcggcgggaccgacggtactgggcggaacagcgcatccgacggcacaaggcggagcggccgtcccggcggtgcaaaccgcaggcggaacaaccgcagaaacgactccgcagcccgcaccggcaagacccgcagtgcagaccgcaccggctccggcacggcgtccgctcatatcgggcgcttcgctctcggaactgctcgcctcggcgggcagcgatcccgacgaagagctttcggacggcgaatcgcccgacgaagccgaagccgcaaccgtcgatccggagtgcgccgaaaagctggagcacgcccgcagcaggatactgaacctcatcaaggagaaacgcccgcgcttcgtgccggccttcgagctgatgacgttccgcgacaacacgatctcggtgagcgtgccgacgaccgaactgcgcgaagagattctgcgcagtaagacgggaatgctgatgcgcatcgccgaactggccggaatagagggaatgatcgaattggaggtcatcgtaaacgaggagatacgggcggtgcgtccgatcaaactcgaagaccgggtacggtacattacggagaaaaacccgctggtggcggagcttcgcaaggcgctggatctggaagtggaataacgcacccgacttacggcgcacgccgcagaacgggttcaggcgaacggccgcagacggaggcgcatgcagaccgccggcacgaccggccggacgccggacaatattgataatcaagacaaagaaacaataaaatggcaacaaagaatttcatcgaagaactcgaatggcgcggcatgatccacacgatcatgcccggcgcaaaggaacaactcgaaaaagagatgacgacggcctatctgggcatcgaccccacggccgactcactgcatatcggacatctggtgggcgtgatgatcctcaagcatttccagatgtgcggccaccgtccgctggcgctcataggcggcgcgacgggcatgatcggagaccccagcggcaagtcgcaggagcgcaacctgctcgacgagccgacgctccgccacaatcaggaggcgatcaagcggcagctcgccaaactgctcgacttcgagtcggacgcgccgaatgccgccgtgctggtcaacaactacgactggatgaaggacatctcgttcctcgaattcatccgcgacatcggcaagtgcatcaccgtcaactacatgatggctaaagactcggtcaagaagcgtttcagcggcgagggcgacggcatgtcgttcaccgaattcacctaccagctggtacagggcttcgacttcctgcacctctaccagacgatgaactgcaaggtgcagctgggcggcgccgaccagtggggcaacatcaccaccggtacggagctgatccgccgcaagctgggcagcgaagccgaggcgttcgccatcacctgcccgctcatcaccaaggccgacggcacgaagttcggcaagaccgagagcggcaacgtatggctcgacccgcgctacacctcgccctacaagttctaccagttctggctcaacgtcagcgacgaggacgccaagcgttacatccgcatcttcacgctgctggaccgcgagaccgtcgaggcgctgaccgccgaacatgaagcggcgccccacctgcgcatactgcagaagcggctggcgcaggagatcaccacgatgatccactccaaggaggagtacgaaaaggccgtcgaggcttcggcgatcctcttcggcggatcgacctcggaggcgctgcgcaaactcgacgaagagacactgctgcaggtgttcgagggcgtgccgcagttccgcatcgcccgcgccgagctggggctgccgttcgtggacctctgcgccgagaaggcgcaggtcttcccctcgaagggcgaatgccgcaagatggtgcagggcggcggcgtgtcgctcaacaaggagaaggtcgccgacgcggcgcgcgaggtgaccgaagcggacctgatcgccggcaagtacctgctggtgcagaagggcaagaagaattacttcctcctgatcgccgaataagatggagtaccgcatcgttctctcgcggatggagttccgggcgctgcacggctgctacgaactggaacgcaaggtcggcaaccgtttcacggtcgatctggaactgacggcagagctgggcgacgccgccgtgcaggacgacgtgcgcaagacggtcaattacctgacggtctacgaagtggtgcggatgcagatgcgcatcacgcagcacaccatcgaacgggtggcgatgaacatcatcgaagcgatttacgccgccttcgcgcaggtacggcatgtaaaatgcaccgtatcgaaactggcgccgccgctgggcggaaagcttgagaaggtgagcgtcgtgctggagaaataggacgggtgtgcgccatgcgcgcacccgtttccgataataaacaggttaggttatgcatcataaggagagtcgcgccacgctgggtggcaaattgagcgccgtgctcgtcgcggcgggcagctccgtggggctgggcaacatctggcggtttccgtacgtcgccggagacaacggcggcggagcctttctgattatctacatcctctgcgtactgctgctggggctgccgctgatgatcgcggaattctccgtgggacgggcgtcgcacctcaatgcggtgggcgcctaccggaagctgaaccgccgatggagttttctgggctacaacggcgtgctggcggcatttctgattctgggattctatttcgtggtttcgggatggacggccgaatacatggtacactccgccacgggcgagatcgcccgctactctacggccgaggagtacaaaaacctcttcgaaaccttcatcagcaatccgtggcggccggttctctacacctgtctgttcgtgctggcgacccacttcgtgatcgcgctcggtgtgcagaagggcatcgagcgttcggccaagattctgatgccgctgctcttcgtcatcctgatcatcctgtcggtccactcgctgctgatgccgggcggcgaagcgggactgaagttccttttcgctccggatttctcgaaagtgacgcccacgacggtgctcgtcgcgctgggacaggcgttcttctcgctctcgatcggcatcgggacgatggtcacctacgcctcgtatttcaagcccgacaccaacctgcgccatacggcgctcaacgtcacgatcctcgacacgctggtagccgttctggccggcgtggtgatcttcccggcggtattcagcgtgggcatcgagccttcgtcgggtccgtcgctggtgttcatcaccctgccgagcatcttcaacgacatgcccctgagcatggtctggtcgtcggtattcttcctgctgctggtcgtggcggcgcttacctcgacgatctcgctgcacgaagtggtgacggtctacctgcatgaagagtggcacctgagccgcaagaccgcggcatggctgacgaccgccgcaacggccgcgcttgcatcgctggcgtcgctgtcgctgggcgtgctgagcggctggacgatctgcggactttcgcttttcgactcgctcgacttcctgactgccaacatcctgctgcccgcgggcggattcttcacctgcgtcttcgtcggctggaaactcgaccggcagatactcagggaccagatcaccaacaacggggagctgaaattccgcatttacggcgtcttcatcttcctgctgcgctacgtctgcccggccgtactgctgctgatcttcctcgacaacctcggcgtattttaacgccgggccgacggcaatagcaaaaacctgaaaccaataacaacccgaaccatgaaacatccgctacttctactgctgatctgctgcgggctttgcaccgcagtttccgcccgtccgatccggggaaccgtcaaatgcggcggcaggccgctcggcggagtcgccgtgacggacggctacacctttgcgcaaagcgacgcgcagggggcgttcgccctcgatgccgacgaggaggcgttattcatcagcgtcgtaaccccggcggggtacatcgcaccgctcaaagagggcgtcccgcagtttttcctcccctacaccccttcggccaaacgtttcgacttcgaactgcaggcgtggcccggaaccgcggcatgttacgaactgctggccatcgccgacccgcagcccaagaccgacgagcatttcgaacggctccgcaccgagataatcccgccgctgcaggccgcaacggccgcaaaaaaagcgcagggagtcaatcaggccgcgattctgctgggcgacatcgtatgggactcgccgcagttgttcgccaaagtcagggagaagttcgcatcgctcggaatccccgtttacggcgtgatcggcaatcacgaccacgacctgaacaaattcaccgaccgcgaagccaccgaaaactaccggtcgcatttcggccccacctattatgccttcgacatgggccgcacccactacgtcgttctcgacgacatcgtctaccacggcgcccgcaaatacgacgagcagatagactcgatgcagctgcgctgggcggcggcctacgccgaacgtctgccggcgggttcgcgcgtctgcttcgcgatgcacgctccggccatgaagtcgtggcgcgacgaacgccgcgtcatggagtcggccgaaaccctgatggacgcctttgctggccatgaaatccatttcatatcgggacatacgcacatcaactcgaatttcgacatccgcgaaggcgcgatggaacacaacgtggcgcagatatgcggcaacctctggcgggacccgatcaaccgcgacggcacgcccaaaggctggcagcttttccgcgaatgcggcgaggatttcgcgtggacctaccagagtctggagatgcccgaagcccggcagctgcgcgtatggggtcccggcacggcggaggactaccccgcttcggtgatcgccaaggtatggaactgggattcctactggacggtcgtatggtatgaggacggccgctaccgcggctccatgcagcgcatctggttcaacgatcccgactacatcgccaacatcgactcgctgaaggtcgccgggaagacggtatccaagtcgcagcggccgcgcacgacgcacttctacttcaaggcccgcccttcggcgtcggcccgcgagatcgaagtcgtcgccaccgaccgttccggccgccgctactcggagcgcataacgctcccgacaaaggaataggacaaaagacagacaggccgccgcagacagacaaggcggacggcaaacagacacgcagacaaggcgctgcggacagacaaacctgacacagacaaaggcagacgcagacaaataaggctgacggtaaacaaagacctatgcaggcagataaggcggacggcaaacagatacacagaccgccgctgcgaatgcggccgcctgagaacgaaaaaaacggagagtcgtacaactctccgtttttcatgtatctgcatcgctgccgatcagttgatattccgccggtcgggttcgtggtccggcgaagcggcttccatctcgatctgcagtttgaccatattgacggccgtggcggcggcttcgtcgcccttgttgccgtgacggcctccgcagcggtccaaagcctgctgcatgtcgttcacggtcagcacaccgaaggcgatgggcatgttccactggatttgcagctgcgtgatgccctgcgtaacgccctgacagataaagtcgaaatgacgggtatctccctgaatgacgcagcccagcgcgatcacggcgtccacgtcggtatattcggcgaagaactgcgcgccgagggccagttcgaacgtccccggaacatacttgatctggatgttcaggtcgggacatccggcggcgcggagcgtccgcacggcgccttcgagcagagcttcggtgacctcgcggttccactcggccacgacgattccgaaccgcatgtccgcggccgaaggcaggggtgagtcgaatttggaaaggttgtgattcttggtcgccatagtcccggttatttcacgctgccgaggagcttctccgcctcacgcgcatccgtcgatgcgggataggaggtcagaatctgctcgtaaaatgcggctgccttttcgttgttgccctgagcctgctcggccagacccgccttgcgcaggtacatcggtgccgtcaggttgttgtcggcggccttgacggcctgctcgtagaatttcaccgccttggcgtagttctgctgctcgacggcgatgtcgccctgcaggcccagattctgggcgttgatgagcgctccggggatgcccttgaccggcgagtatttcgccagatatttggcggcgttctccagatcgcccgtcttcaggtagcagatacccgcatagtgcttggcgaggttgcccgaaggcgtcgaaccgtactcttcgatcacgtcgaggaagccggcgccgttggcgtcgccttcgagtgcgagctgataatccggattctgctcctcgaaacggtactgagcctcggcgatccgctcggcggctttggtggcgcgaggggctacgatcagtgcgcggtatccgaaaataagggctgcaagaaccagcaatcccagaaaaatatacgccatgttacggccgtttttctcgaagaaaagctcagttctgttcattgcttcgccgagggtctcctgctcggctacatgctgctttgccatatgaaaaatatcttgttttagttaaatttcggtatgttagtctgcaaagatacaaaactattcagaatgtgcaatgcgctgtccgctttttttgtatctttacaaaaaacagacggcgccccgtacgggcggcacttcggcaaatcgcaaacaagtttgcatttgcactcaccttgcattatctttgggctatgtttctgaagaaaatatcgctgctgaatttcaaaaatatcgaacaggcggagcttgccctctgccggggcgtcaactgtctggtaggcgacaacggagccggcaagaccaacgtcatcgacgcggtctactacctgtcgatgtgcaagtcgtcgctgcccatgaccgacgggcagagcatccgccacggcgccgacttcttcctcgccgaagggcagtatctcaccgacgggggaaagagcgaaaacatcgtgtgctccttctcgcgcaaaggcggcaaagtgctcaaacgcaacggcaaggagtacgaacggctctcggaccacgtggggcttgttcctgccgtgatcgtatcgccggcggacagcgccctgatcagcgacgcctcggacgaacggcgccgctacctcaacgccttcatctcgcagctggaccggagctatctgaccgccgtgatgcgctacaacgccgtgctggccgagcgcaaccggctgctcaagaacatgcccgacgagacgatgctgcagatttacgacatgcagctcgtcgaacagggcgagcggattcacgcccggaggcgggagttcgccgagcggctgcaacccgtggcggcggagtattaccgcatactttcgggcgaccgcgagcaggtcgaactgcactacaaatcggaactgaacgaccgtccgttcggtgagattctcctcgccgcgcggcagaaggatctggccaacgagttcaccacgtcgggcattcaccgcgacgatctggtgctcaggatcggcggctaccccttgcgcaaatacggctcgcagggccagcagaagtcgttcctgatcgccctgaaactggcccagtacacgatagtcgcgcaggagaaaggcgagaagccgatcctgctgctcgacgacctgttcgacaagctcgacgcggggcgcgtggaacagctcatacggctggtgtcggaagattcgttcgggcagatcgtcattacggactgcaaccccacccgtctgcgccggattctggacaaggccggcggggcgtactccctcttcacggtcgaaaacggcggcatcgggcaggagaccgcaacggccggagcgccggcttgcggcgggcagcttccggccgaagagagcacgaaggaagcagcggaccgaacgcggcatgccgggccgcaggaggctgggtctgcggaaggaatccggacggcagcggtgcaaggcgaagtttcggaggatttacgcaacgcggcgtccgcaggcgaaaaatccggcggacaggacgcctgcgtgacagatacggcagacaaaacatccgacggaaaagagggagcgcgatgagacggaccaagacgatgctgatgggcgacctgctggaagagtttttcaaacgcccctatgtcgcggccaaagtcgccgaaggaaagctgcccgacacatggcgcgccgtcgtgggcgaccgcgccgcagacttcaccacggaactgaagctggaaaaccacattctctatgcccgcatccagtcgagcgtgcttcgttcggaactcttctaccagcgcgaagcgctcaaggaggagctgaaccggcgttccggcgtccggatcgtcaatgcggtgattatcaggtagatttccggtacggaaggaacggaagatacgggaggtacgagagattcgggaaataccggagcaacggcaaataagagagataagaacacggcaggcacggaaaatacaggagatacgacaaaaatacggacacacgaaaaggctggggctagggctgagactgagacagactgagacagactgagacagactgagacagactgaaacagactgactgcctgagaaacacggaaaatgccggggcatactttccgccccgctccggatcacacaaaaaaaggatgcgcctgtaaaggcgcatcctttttttttatccggccgggccgaccgggcgaaccggtcattccgtcccgcggggattactggataatcgcggcgcggttggcggcctgaaccttcttgaagggatcgggggagttgcccttgccctcgtaattcaactgcttgggattcacgcccttcgatacgaggaagtcgtaaacccgcttggcgcggtgctcggcgacgcgcttgttgccggcagcggtacccgtctgctggtcggcgtgacccacgatctggtaaacggcatccttcgagccgctcttgatctgctcggcgatcagctccagacgcgtcttctcctgcggcgtcagcaccgacatgctgtaatcgaagagaatgatcgaagtgtcggccaaagcggcttcgtcggcggcgacaaccgttgcgacggcagcagctgccgcggcatcggcggcggcgttctgagcggcggcagcctgcgcctgagcggcggcgagctgctgagccagctgggcgttctcaagctcggcggcttcgacagcggccatgcttgcggcaacggcgtcttggaacgcctgaatgtcggcggccgtatagcccgctacgccgcgctgccagccgcgcttgttaaagcggtaggtgaagcccgccgtagcgctgaagccgaacaggtaggaaccgtccgtcttcgcggggcatacgcgcgaaggcgccagcatgcctttcagctcgatattgaagtcgaacgaacgcgacaagcggaacttgttgagcagaccgtaagagaatgcgaaagcctgatgcgtgccggtcatattgtcctcttggctcttgtccgtgaagttcgtagccagataaccgaagcctacgaacggcaccagataataggcccggtcgtcgcggtaaccgcccgcccagttcgagaagttaagcataaagtcggaatgcacgaagaggtaaggccacttgagtttgcccagatcggcgtcatagttggcaaactgaccgccctgcagctgcagacgcatacctactacaggatgcacccattttacaagcgaaaagttcgcttcgaatccgagacgttttccgaaagaccccgaattggagccgttcgtcagggcagtgcctacaccgccgcccagcgacatctcccagttatcccaaaatccattggacacaaaacctgcaaagctcggttttttgggcgtctcctgcgcccatgccgtcgtcgcgaatgccacgaccgcaagaattagaataagttttttcatagctaacattagttattcccagttgtaaaattataaattaatttttcaaaatccattcatcgacagcatgaaacgcaaaaacagagccgaaagcgactaaaaaaggccgaaaacatacgtttccagccttttaatctcaatatcaaatcttttcagatcagccgcatttcgaataaccgcacgacatacaggtcagacagccgttctggtaggccatattctcctgtccgcagctcggacatttgcctttcgacttggtgccgtccacgatatattgcttcagcgcacggcagacgcccgtcttccatgtgttgatcgactcgctgtccagatggagcgactcgatgagcgaaacggtcttctcgatcggcatgccgtggcgcaatacgcccgaaatgagtttggcgtagttccagaactcttcgtcgaacagacgcgagatgccgccgatggtattcgtataaccgtaacggtcggtatactggaagtcgtaacgcttggtgccgtcgtcctcgcggaccttgatgatgaagcccttgttgatcttgcggggaatatacatggcgtcctcctcgatcttacccgtgaagacctcgtagggacgtccgtcctgaagtcccacgaaggcgatccagtcctcggtgccgttcttgaaccgcacgatgtcggcaggaatcgacttgggacgcttcgccacttcgccgggatgcccctcgcacttctttttcttgttcttggaggccttgtcgagcagcacaccgtcgcggcagccgtcgcggtaaaccgtaacgcccttgcagccgcactcccaagccgtgcggtacacgtcggcgacgagcgcttcggagacattgttcggcaggttcaccgtcaccgagatcgaatggtccacccatttctggatcgcaccctgcatcttgactttcgcaacccagtcgatgtcattggccgtggcgccgtggtagggcgaagccgccacccactcgttcagctcggcatccgagatggtctccagtttcgacgtatcgtatccgttcgcgtccagccacttgacgaaattgtggtggtagacgttgtactcctgaaacttttcgcccgtttcgtcctcgtaatcgacgtgcgtgtcatggtccgaagggttgatcttgcggcgacgcttgtagaccgtacggaacaccggttcgatgcccgacgtggtctgcgacatgagcgacgtggtgcccgtcggggcgatggtcagcatggcgatattgcggcggccgttcttctccatttcggcatacagctccggatcggcctcgcggatgcgggcgatcatcgggttgttcttctccttcgaagcgtcgtagatcgggaacgctccgcgctgggcggccatccggaccgaagcgcggtaggcttcgacggccagcgtcttctgcacctcgacggcgaaagcgatcgcctcgtccgagccgtaaagcagccccagcgccgcgagcatatcgccctcggccgtgatgccgagacccgtgcggcggcccttctgcgccatggtgcggatcttcttccacaactccagctccacgcggcggacctcctcgtcttcggggtcggcggcgatcttggcgatgatctgctcgaccttctccagttcgaggtcgatgatgtcgtccatcatgcgcatggccttgccgacatgcgccttgaacctgtcgaaattgaacttcgcctccttggtgaaggggttgtccacatagctcagcaggttcatcgccagcaggcggcacgaatcgtaggggcagagcggaatctcgccgcaggggttggtcgaaaccgtcacgaagccctcgtcggcatagcagtcgggcacgctctcgcggatgatcgtatcccagaacagcacgcccggctcggccgacttccatgcgttgtggatgattttatcccagagtttcttggcgtcgatgtcctgctcgtatttgggatggtccgacttgatcgggaactgctggtggtacttcttgcctgcgatcgctgcgcgcatgaattcgtcatcgatcttgatcgagacgttggcgcccgtgaccttgcccgtatcgaccttggcgtcgatgaaacgctcggcgtcgggatgcttgatcgacagcgagagcatcagcgctccgcggcggccgtcctgcgccacttcgcgcgtcgagttggaatagcgctccatgaacggaacgatacccgtggaggtgagggccgagttcagcacggggctgcccgtgggacggatgtgtgaaaggtcgtgccccacgccgccgcggcgcttcatcagctgcacctgctcctcgtccatgcggaaaatgccgccgtacgagtcggccgggttcttatggccgatcacgaagcagttcgagagcgaggccacctgaaagttgttgccgatacccgtcatcgggccgccctgcggaatcacgtaccggaaatggtcgagcagctcgaacacctcctccttgctcatcggatcgggatacttgcgttcgatgcgctcgatctcggcggcgatacgctcgtgcatctgcttgggcgacgtttcgtaaatattgccgaaagagtccttgagggcgtacttgctgacccacaccgttgcggcgaggtcgtccccttcgaaatactttttcgactcggcgaccgcatcgttgtattcgactttctgcggcgccacgggttttgcggcttttgacatgactatattactttatttcagaattttagcgtcggaacggacaaagtccggttttacaaaaatgattcttttatatggaaaaaaccagcgacgcacaccaattttatccacaagttatttacaaaaggtgtaaaagatgcgccccgcatacgtgagacgcatttatcggccggcggaaacccgcggcgccggtttcggcgtgcggaccgcggcccagaaaagcaccggctacttcaccgccacggcgtcgatctcgaccagcgcgcccatcggaagcgccgccacctgatagcacacgcgggcgggcatccgctcggtaaagaaccgggcgtaaacggcgttcatcgcggcgaaatcgccgatgttctgcagcaggacggtggtcttgaccacgtcgccgagcgtatagccgccctcttcgaggatgtggcgcaggttcgtaagcgaccggtgcgtctgggcttcgacgccttcgtccattttactggtggcgccgtcgatcggaagctggcccgaaacatagagcgcgccgccggcttcgacggcctgcgagtagggtcccacggctttgggcgcatggggcgatgcgataatcttcttcataacgggtatttttcaaattttacacaaaggtacgatttattccctatatttgcacaacacatatataataatatactatgaagattttgctgaaaatcgcggccctcgccgccgttgcggccctcgccgcagggtgctgcagctgccgttcctaccagaagaaaaaccgcaggccgctcgtcggcaccgaatggcagctcattcagctgggcggcaaggccgtcaaacccgaagagggcaaattcacgcttacgtttctggccgaagagaaccgcatcgcgggcatcggcgcctgcaaccgcatcatggggaggtacgaagcgaccgagaagggcgcgctgaagatcgggccgctggcatcgacgatgatggtatgccccggcatggagcaggaggacgcgttcaccaaggcgctcgaatcgacgacgcactacgatatggacggaccgatgctgctcctgctgagcgacggcgaactgcgggccgtatttcaggcgaagccctgagacgaagcacgggcgcagcctgacgacaaaaaaggggaggactttcggacagtcctcccctttttcatacggctcgccgcgtctatttcaggtgcggattcaggctgcgccattcctccacgggcgggatgatacccatcgaaatcacctcgtcgcgcagtttgcagaggtgttcgtagctggcggcgagggtcttgttctcctcggccgtgccctgcacgttcttgtagctgacgccctccttggtgatctgggtctccatagccatcaggatatgcttgaactcatcgttgtgcacgaatacgccggccggatagccgaacggcttgccgcccatggccgcagcgatcatgcagatcgacaggtaggccgggctttggaacgacgagcggccgcgcaggtcgatgatatgcttgccgccctgaatcacacgctgctgcaggtcgtgccagtcgccttcgggcatttcatggccgatcagctccgaaagaggacgtccggcgacgagcgtcgtcgaggcgaagacggccatctgctcgccgtggccgccgtaggtgcggcagttgcggatttcgtcgggcgaaatcttgaaatacttggccagctccgaacgcaggcgcgtgctgtccagcgcggcaagggtcgaaagctgcgagggacggatgcccgcatagatcagcgttaccagtcccgtgatgtcggcgggattgaaaaccacgaccacatgcttcacaccggggcagtaggtcttgatgtccttgcccagctgcgcggcgatctcggtattgcctttcagcaggtcttcgcgcgtcatgcccgccttgcgcgccgcgccgcccgacgaaacgacatacgaagcgtccgtaagagcctccttgatatcgctcgtccaagtgatgttcaccccttcgaacgcgcagtgataaagctcctcggccacgccttcgagcgcgggagcgtacgggtcatacaggcagatgttcggcgtaaggcgcatcatcagcgccgtctgggccatgttcgagccgatcataccggccgcgcccacgatcgtgagtttgtcgtttgtcagaaattccataactgaaactattttaaattgggtacgatcccgtacccgggtcttatttgctgaagcggaacgtaaattcgttcttcgcgtcgcgcatccaagcgaactgccgcgtagtgggcgaaatggcgaacaggggcgagaaagtcgtcgccttcaccgtcacgccgtcgggcatgaactccagaatgcgtatccagccgtcgccgccgttaccctcgtaaccgccgcccatcgactgcgcgtcgaagagcatctggtgtacgtcttttccggcgctgtttctgtcggtgcggaacccgcttcccgaaatgtggccgcagaccaccagttcgatgttggaagccgggcggaccagtttctgccagagatcctcgccgttgctggcgtcgggaagcggcagtcccttgatcttcacgatcctgccgttgcgcaccagcggttcgtagctcgtcaccttgcaggggccggaaagccgctggtccttggcatcgaggtaagcgtgggtcatcagcacgatccggtgatcggcgtactcctccagccccgccacctgctgcgcccacttcatcaccgtatcgcggggcgcgaactccatattcaggaaaaggtagtccttgccgtcgggggccttcagttcgaaggcgcagttctcgacggcgggattctcgtccgaatcgagtccgaactggcagatcgccgccgcgttgagcgggttgcggccgatcgggaaatattcgttcaggtgcgtgcgccgcgcgccgctgcgggtataggtgtagtcgtggttgccggtggcgaccagatagggcacgcggccgtccagcacgtcgaacgcatcggccatgccctgccattggcgcaccgaggtcaggtcgcctgaaaaaccgttgccgatgcggtcgttctgctcgaccacgtcgcccacgcagagcaccatccgaacgttcagccgctcgatgttgtcggcgatccacgccgtcatcaggcgggcgatgggctggctggcttcgttcttggcatatccctgcaggtcggggatcaccacgacgctccacgattcgggattctccagcgcgggttgccggtattcctcctgcgccgcagcgggcaggctccacaacatggcggccaacgccgcgagggtcattattcctcttttcatttttcgtaccgtttatttatcgggccgcgaatcattcgacttcgcggcggttccgcaaagcatgcgtgatggtcagctcgtcgacgtattccagctcgtcgccgaagccgatgccgcgggcgatcgaggtgactttcacgccggggaactgccgcaggcggttcatcaggtagaagagcgtcgtctcgccctcgaccgaggtcgaaatggcgagaatcacctccttcacgccgccgcgggcgatgcgctcggtcagcaggtcgatcttcagatccgagggcgaaatgccctgcatcggcgaaatgaccccgcccagcacgtggtagagacccttgtactggtgggtattctcgatcgagagcacgtcggcgacctgctccacgacgcagatcgtggtccggtcgcgctcgtcgtccagacagatcgggcacacctcctcgtccgaaaggttgttgcactcggcgcagtatttcacgtcgttgcggaaacggtcgatgctctccgtcatttcggccaccgactcccgctccatgcgcaggatgtggatggcgagacgcagcgccgtgcggcgccccacgcccggaagcttcgacaactcgccgacgacgtcctgtagtaatttagacattcagatcgtttcgattttgcggcactccagccaccccttcttgccgtcggcgatcaccacttcgcaccagtcgtcgagccggttcgtgatcgtcacgaccgtgccttcgtgcagcacgaaaaggtcggtggacgacttgtcgggcgaactcttgaccgccgtagaagcggtcatgaccacggccgaagtgtcgtcgagcatctcgcggcgttcgcccagcgcgaaccacgtcgtcagcatgcacagcagcacggcgacgacggtgccgtagaacccggccttgcgcagcgaaagccgctgggccagcaggtagaccagaaacagcgccagcgcacaggccagcagcaccagcgaaaggacgctccacgccgtacagctcatcgtgtggcgggcttcgcgcatccacgtcacgaagaagaattcgggaatatcctcgatgttgtccttcgtgcgggcttcggcgacgctcaggttgtggcggatgtcgtcgttgccgggagccagccgcagcgcccgtttgtaatagaggatggccttgccgatgcggtcctccttgaagtaggcattggcgaggttatagtagagtttcacggagcttaccccgcgggaaagaatctcttcgtagacttcggcggccgaatggaaattgccgttgatataggccgtgttggccatgtcccacaactcatcggtcgtgggccggggcgcggactcgctctgctccgccgccggctgcgcaaggctgtcggcaggctcctgcgcataggatgcaagccaccccagcagcaggacgagacaaactgaaattcgttttttcatagctgttcctatcgttttatcatcgcttcgatccgcgaaatgatatcgacgccctcgccgtagacctcggtcatccgggccgatgcggccggcgaatactgcgcctcgtcgcacttggtgatgatggccgtgaaacgctgcgactcttcggacgagacgccccgtttgtgcagctcctcgcggacgttctctttcgtgaggttggcgaccggaatgttgaacttgtcgctcatgtagccccacaacgcgcggagcatctcctcgtagaacgcatggcggttctgctcctccatgtagcgtttggcggcgcggaaacgctgcacggcgaccttgttggcgcgcttgccccgcagcagggccacgttctgcgactcgcggatctgccggcgcagcgcgacgtagaccattgcgaagaggatcaggatgccgaagaacagcacccagtaggccgcgctgaagaggaacggttcgcggaccgaacgcagctgcggactgcccagcttgatgaagcggatatcctgtccgagcagcttgacctcctccttcgacatgccgcggccctgcaccacgagagcgtcgccgccgcccttggcgtcgggcgtgatctccagctccagcgccttcgacttcagcgtcatgtactgcatgcgcgacgggtcgaaatagctgaattcgacgggttccacctcgtacgtgccttcggcgcgcgcgatgaagggatattcgaactggcggtagccggagatgccggccgcagaggtgttgatcgactcggtggtcttgacgttatactgctcgaacgaagcggggagcgtcagtttgggggcctgcacgaacgtaaggttgcccgtgccggagatcttcaccgtataggtcgccgcggagttggcggccagccgctcctgcggaagcacggcgtccatcgtgaaactgcccacggcgccgctgaagctggcgggagcgcccgctggcagcggcttgacggcgatgttgatgcgcggactctgcaccttgcggggcacgttgacgaagtcgggaccgcccccgaagaagggatccacgttgcggcgtcccggcaccacgacctgcgccacggccgtcagttcggccggctcgatcacgagcgtcccggcctgctgcgggtagagcaggtactccttggccacgagcgtctcatagaccttgccgttgaaggtctcgcgctggcgccgggcattgtcggtattgagctcctgcgcccagaatccgttgaacgacgggaatttcacgtcgttgtatcccacgaccggcacccgctcgtacagcttgaacgtcacgcgcagcggctcgcccttgtagaccgaggtccgcgacacgacggcgcgcagcagaatgtcgtccttggcgatctggttctgcgccgtaacgtccggcgaggagtcctcgcgcggccgggactgcgtgccgccggcgccgggggacttgccctcgttcacgatctcgatcggcagggcgttggaacggtagacggtgccgtccaccgtgacttcggcagccccgacggtgacgttgcccgcagcctgcggaagcaggacgtaggtgatcgtgtaattgatgcttttggtcatcgctccgttgacgatctggatcgactggcccgacgactcggccgggccggcgatcacgtcgaatccgtcgaacgaaggcgccttgaacgtccccttgtcgggataggcgttgagcgcgaactccacgcggaacgcttcgccgacggcgaccgtcagcggagagctggcctcaaaagtgaccttctcggcagccgatgccgagaagatcgccagcgcgaagagcgccgtcagggatattttcgcaatgaaatctctcattgagccttacaataaaatctttcttcagattttacaacgtaaacttttgcccgttagtatatctccgggccgttttttaatgtttgaaatcggcaaaaaagtcgttgcccttgtcgtcgacgatgatgaacgccgggaagttctcgacgtagatcttgcggacagcctccatgcccagttcggggaagtccacgacctcgaccgacttgatcgagttcttggccagaatagccgccgggccgccgatcgaaccgaggtagaaaccgccgtgcttgcggcaggcgtcggtgacctgctgcgagcgattgcccttggccaccatcaccagcgaaccgccgtgcgactggaacagatccacgtaggggtccatgcgtccggccgtcgtggggccgaacgagcccgaagccatgccctccggcgtcttggccggacccgcgtagtacaccgggtgcttcttgaagtattcgggcatgggcttgccctcgtcgagcatctgcttgatgcgggcgtgggcgatgtcgcgcgccacgatcagcgtgcccttcaggttcaggcgcgtcttgatcggatatttggtaaggatttcgcggaccttgtccatgccttcgtcgaggtcgatgtccacggcgggcgacatggcgggcgcctcggcgggcaggaagcgggcggggttcttctccagcgcttcgaggaagatgccgtcgggcgtgatcttggccttgatgttacggtccgccgagcagctgacgccgatggccacggggcacgaagccgcatggcgcggggcgcggatcacgcgcacgtcgtgtacgaggtacttgccgccgaactgcgcgccgacgccgctctcctgacagatcctgagcaccttctcctcccattcgaggtcgcggaagcagcggcctccctcgttgcccgaagtgggcagctcgtcgaggtagccggccgaggccttcttcacggtcgaaaggcacatttcggccgacgtgccgccgatgcagatcgcgaggtggtagggcgggcaggccgacgtgccgaggtcgaagatatgctgtttgatgaatttcgtgagcgactcctcgttcagcagcgccttggtctgctggtagaggaaggttttgttggccgagccgccgcccttggtgatgaagaggaattcgtattccatgcccggacggccgccgtagatgtcgatctgggccggcaggttggtgcccgaattcttctcgtcggtcatcgtgaagggcacgacctgcgaatagcgcaggttgcggtccttgtaggtttcgtaaacgcccttcgcgatgcacgcggcgtcgtcggcccccgtgtagacgtcctcgcccttatggccgatgcagatggccgtgccggtgtcctgacaggtcggcagctcgccctcggccgcaacgacctgattcagcagcatggtgtaggccacgaacttgtcgttgtcggtagcttcgggatcttcgaggatgttgcgcagtttctgcaggtgcgcggcgcgcagatagaacgacacgtcgcagtaagcggccttcgacaacagttcgagacccgcggggtccaccttcaggattttacgtccgtcgcactcgacgaccttcacgtaatccttcgtcaaaagacggtactcggttttgtcctcccccacggggaacggctcctgataaataaaatcagccataatggtagtttgtttatgtttgtagtatcaatatccttgcaatccttacagtccgccccgacgcttcgaccgccgcggggcgcggaagcccgtccgcgattcgggaatcccccggagctaaagccatgcaaaaatacaaaaaacaatccggattgcgcaacaatttccggccgtctgttatttttttcacaaaaaggcgaataaaatagcccgaacaggcgcaattaattagaatatttattaaatttgtgcggtttttcgagagaaacaattcactgcataaattaaattactatggtatcctacaaagatttgggtcttgtgaacacccgtgagatgttcgcaaaggccatcaagggcggttatgccatcccggcattcaacttcaacaacatggagcagatgcaggccatcattcaggcttgcgtggaggcttcgtcgccggtaattcttcaggtgtcgtcgggcgcgcgcaagtacgccaaccagaccctgctccgctacatggctcagggcgccgtcgaatatgccaaggaactgggcaagaacattccgatcgttctgcacctcgaccacggcaactcgttcgagctttgcaagagctgcatcgacatgggcttctcgtcggtgatgatcgacggttcgcacctcccctatgaggagaacgtggcgctcaccaagcaggtggtcgattacgcacaccagttcgacgtgacggtagaaggcgagctgggcgtactggccggtgtggaggacgaggtttcggccgagcaccacacctacaccgatcccaaggacgtcgtggatttcgtatccaagaccggcgtagattcgctggccatctcgatcggcacctcgcacggcgccaacaagttcaagcccgaacagtgcacccgcaacgccgagggcatcctcgttccgcccgaactgcgtttcgacattctggccgagatcgagaaggagcttccgggcttccccatcgtgctgcacggatcgtcgtcggttccgcaggagtacgtgaagatcatcaacacgcacggcggtgcgctgaaggatgccgtaggcattcccgaagagcagctccgcaaggctgccaagagcgccgtctgcaagatcaacatcgactcggacggccgtctggcgatgaccgcagccatccgcaagatcttcgtagaccagcccgccgagttcgacccccgcaaatatctgggtccggcccgcgacgagctgaagaaactctacatgcacaagtgcgagagcgtgctgggttcggccggcaaggcttaatccgcaacattccgacaaagaaacccggtctttcgagaccgggtttctttcgtttccggcatgcgttgccggaaaacggcagctccggagaaaagagtcgcaagggcgcggaattccggacgcaaagcgacgcggagacatcggatataccccggtccgggcgggaccggacagagtcatcggactaaataacaagtacttaacagcaacgccccacacccgatttgacccccggctttgttttgacaagaaagggggtatttctatttttgctgccgagcggcactatgccgatgccggaccaatcacaatcaaatcaggttaattacgaactatattaaaaaatgcggaaaaagagtaataatatcggagaatggttcctactaaggtctgttggagacgaatccgtcgatatactctttatcgtgcgcgacaacagcaaaagcctgcctgatgagcttgtttgcgacagcgatcatagcgagttttcccgattttccgttttgcctgagcctcgtataggtctctttgcattgggcattgaacctactggcaggccaagcggcgatatagagaagtcctctagtgtatgcgtctccgtttcggttgatatgccctttgatgtttaccgaagttccggactgttcgtaagtgggacaaattccgagataccgggacacctgcttggcattttggaagtaggtaaagcctccagtagtgatgatgagcgccgtggcaagcgttatgcctatccctttgatggtcgtcagcagcgcgagttgtcggctgaactccacttcgacaagatccgtgagttccgcctggagcctgtcacgcttcttttcaaggaacttgatagtttcgtctacggtatgagttgcacctttgtccgggacaggcagacatgcaagagagccacgaaggttcgacatggcggtaatctgcttagtaagttggcgaatgacggttcttttctgtcggagccgcaggatggcctctccctgtaccttgaaaggacgcgggttcatcttctctccgtacaaggtaatgagtcgtgcatcgctcttatcggtcttgaccgtagagagcaaggctttggcgaagttctttaccttcagcggattctccatgctgacagtaattccggcgacattgagcatatacagcagcaaggcgctgtaattccctgtcgcctccataacacagtggatactgccgtctttggggagagtcccgataaactgtctgataccagcggtcgtgttgttaaaagtacggatctccccgcctttgtcggaggagtaagctaccacgaatgtagccttgctcacgtcgattccaatgtacctcatggccgttcattttttggttttaacgacatcgcttacatcttggtccttcattgcgaatacgggctcagacaccttacgaactatccggattctgatgtaaagagtatggggtcagaacataattcccggtttagaaaaccaatgagagatcggacttattccatactctgatgtcttaactattcaaatttaattaactaattacaaatatacaatggagagaatagaaaaaaccttgctgctgccgctgctggcggccgcagtactgtcttccgcgtcctgttccgacgacaaggagaaggagccgcccgtgcgggccgtaaattataccatcgagttctcgaccgtctcgcaggcggtttacctcggagacaaataccaaaccggagagggcaattaccgtctgacattgaccaatgcggacggagacgtgctggaggcggatctgacgagcgtcaaagcccccaaaccctccgccgcgatgcccgaagcgggcgtttacacggcggcggagacccgccgggcgggaacgttcgcgccggaggcatcctcgtgggaaaccgtcaaaagcggcgtcgaggtccggagcgcgaatcaggccgggcagaaaacgaagttcgcgatccgtgcgggcagcatgacgctcgcgcccgcggcatcgggcgacgggaccttcaccctgtcgggcgaggtgaccgacggagacaaaaccgccctctcgttctcgtggagcggcgcgctggccttcgcaaacgaatccggggaggaagacccggtcgtgtacgaacggctgtcgatggtcttcggcgactactatcccgacgactacggcattgcggccgacacctacatgctccgcggcggcaacgaaagggtcgaactgcattcgcagctccgcagcgtgccggccgccgatccggcggcgccgctgcccggcgacggcaaatacacgatcgacctgcgctcggaagcgggaaaatacgccaacgaaaccttcacgttccgctcaggctacatctcccagagcggccgggccgccggcacctactggaaaaccgacgaagccacctacgtcgccacgtcgggatcgttcaccgtctcgaccgtcggcgaaagctggaagatagagggaacgctccgcgacgacggggccgaagagacgttttcgttcacctacaccggaaaacccggattcaaaaactaatccccaaatacgttacgacctatgcaaatcttcagaaaatcactgctcctgaccgccgcgctggccctgacggccttcgccgcatgcagcaacgacgacaatgaaaacggcggagacggcaaagagaccgatcccgattacctcgcactcccccacgcctacggcacctattaccacacctactggggcgacgcggccggcgactactatctggtgctgaccgacgcagacctcgatcaggccgatgccgcgccctacaagtaccggctcgacatcgacttcctgagcgtactggcgaccgatccgaaaagcgcgcgtccgctggacggcgaatacaccatcggcaaatccaccgacaacaaggcaggcgtattcatcgagggatttctcggaaccgattccttcggcatgccggctctgttcggcacctattggaacgagcctgacgaagaggagggttccacaacgccccacgccatcgtcggcggaaagatgcggatcaagaccgacaacggcatcaccacgatcaaggcggagttcatcgacgaagacgacagcacgctgcgcgtcagctaccgcggagcgctcgaattcgaaaaccgcataaacgactcttaccgcggcgactcgaaactgaatgccgactatgcgatgaacgccgacgcgccggtggtttcgatcaagaagatcacggacgaatgtacggcccggtacgaccgctgggacctgcacttctacgaaaaggagtgctacgcgacgcagggcgcgacggggtactacctctggttcaggctgaaaacggctccggggcaggaatacattccgtcgggcacctacaaagcgacctcggacgacacgcccggcttcctgcccggcacacgggaagagctcggcggcggaaatctccgggccgtgaacacgtggttctacagcggccgcacgccccatgccccgatgaccaacggttcgctgaccctgaaaacgtcgaacggaacggactacgaagtgtcgttctcgacgggcgacgaccacccgatgccctatctggtaacgggatcgttctccggaacggtgaaaaagctcgcctccaattaggcgccccggataggcggattttcgcggccgcccctcttcccggcacttccgggaacggtccgcaaatccggaagatgtcaaggccggaacttcagagaagttccggccttggggtttcatgcggggcgcaccgttgtcaggaccgcagccgatttcgggttcggcaccgttttcagagctgcggtccctttgagggctgcaccgttgtcaggtcagtacttttgtcgggtctggcaccgttcccggatcggcggaccggtctcctgcggcagatcggagtccatgcggtccgaagcggttacggctccagcacggaccgggcggccgcggaatcagcggacgtattttccgacgaactcccggacgacggcggtgtattcctccctgttgtcccggtaggagtaggcgtgtccggctccgggaacgagccacagctccttttcgcccggcttggcctcatagagcggatagaccatccacgtaggcacgtaatcgtcggcgtcgccgtggatgaagagcatcggaagttcgcacttggccacctgcgccagcgccgaagcctcgcggaaattccagccgtattttagatcacagagccagctcgcagtgtgcatcagcggaaatgcgggaagtccgaacgaggttttcagctcgttcgagaactcgtcccagacgctcgtgtagccgcagtcctcgacaaaacacttcacataggggcgctgcgactcgcccgcaaccatcatcgtcgtggcggcgcccatcgagataccgtgaacgaccatctgcgtattgccgccgaagagggtgtcggcgacctccatccagcgcagcacatccagccggtcgagccagcccatgcggatcgcccggccttcgctccgcccgtggtagtgcaggtcgggcagcagcacgttgtaacgcaggtcgtgattatagaggtagccgatcatcagcatccgcacggcgcagtcggtatatccatggacgatgacggccgtgcggtcggtcggttcgggagccgcggcgtagagcgcatggagccgcacgccctgcggatcgacgatcaccgtatcgcgcaacgctccggcccgttcgaggctgtccgtccacggacgcaggaaaggatactcggcgtacatatattcataggccgtcgcatttttcgcccgcatcgtctcttcagggcgcagcgagaagccgagcatgtagaaactcccgccgataacagcagctatcagcaacagcacaaaaagggctatgatccgtaaaatccgtctcgtcgtcataactttcggttacaggtccgcactcccggagagcggcgcgccgtcccaactcgaagaggtcccggagacacggggtatctcagggcgccgctgcgccgactcattcggccgccagtttcgtccggatgtgcgccagcatgtcgtcggtcatgcgcgaaaggtcccattcgggtttccagccccactcctcgcgggcgcaggtgtcgtccagcgaattgggccagctctcggcgatctccttcttgacgggatcgacgtcgtaatccatcgtgaaatcgggcagacgcttcctgatctcggcgcagatgatctccggcgtgaagctcatcgaggcgatgttgaagctgttgcggtgaacgagtttcgcgggatcggcctccatcagttcgacgcaggcgcgcagcgcgtcgggcatgtagatcatgtccatatagacgtccggcggcacggggcaggtgaaccgcccggagcggatggcctcgtagtagatctcgaccgcatagtcggtcgtgccgccgccgggcagcgtgacgttcgaaataatgcccggaaaacgcaccgagcgggtatcgacgccgtatttgtggtggtagtagttgcccagcatttcgcccgtgaccttgcagatgccgtagatcgtcgtgggctgcatgatggtatcctgcggggtccggtccttgggcgaggtggggccgaaggcgccgatcgagctgggcgtgaagagcgcgcagtggtgctggcgggccacttcgagcgagttgttcagcgcacccatgttgacgttccacgccatctggggattgcgctcgccaacggccgagagcagcgccacgaggttgaagatcgagtcgatatggtaacgagcgaccaccgaggccatggccgtagcgtcgagggcgttgagcacttcgaaaggccccgcttcgccgagagccttgcattcgcgcatgtcggtggcgacgacgttgcggtcgccgtagattttgcgcaggtaaaccgtcagctcggaacctatctggcctccggcgcctattatcagtatacgtttcatgggtttagagttataatgcaaaagtaaagatagaaaataattgtgaaaaccgcacaaatttttggtcttttcatttttcttatgtacttttgcaccactcgaatgagaaatgttgctgttgtagctcagtggtagagcacttccttggtaaggaagaggtcacgagttcaatcctcgtcaacagctcgcaaagcaaggattacgtgtcacgtaatccttttttcatttcggcggaaaggcctgacagggaacaggtggagcggacggcagcggtccgccggctgcggagatgcccaatgcgaaagatgcaggccgggggggggtccgccggccgccgagacgccgcgtcccatgcggaagtctccggaaggggcggccgcttcaggcagacgaaaagcgacaaaacaaacaatccgaagcccgattgccacccaatcagccaatactgcgcccaaaatggactatccaaaccgatcgtttgccgtaactttgccgtgtaaatgaatacggacatgaaaattacggtcaatcccggcatggaacacctgcggcagttcgtccggcagcttccggagcttttcccggtgtcgggcgaagtgcttcatgacggccgcaatcagatacgcgccttcgacatcggaggcgaacggctcgtggtcaagcgttacaaacggcccagcgcgttcaatgccgtcatgtactcgtttttccgcaagagcaaggcccgccgcgcctacgaacacgccctgcgcctgcgcgagctggaaatcgacacgcccgaacccgtcgcatggagcgaataccgccgcaacgggctgataacggagacctatttcgtatcccgcaggtcggactacacaccgctcacggcggctacggaacggttcccgacctccgattcgctgcccgtgctcgaagcattctcccgtttcaccgtccggctccacgaaaaagggatctgccacgaggatttcaaccagaccaacatcctctggcggcacgacgaggcgacgggacgctaccatttccagctgatcgacataaaccgcatgaaattcctccggcggccgctccgccccgacgaatgcatgatcaacctgcggcggctgagctgcccggccgtggcgtttctatacatcctcgaccgctacgccgaaacgcggcagtgggatatggacgacacgctgctgcggggcacgtttttcaggcttctgttcggacgccgccagcagttcaagaagcgtttcagggagcgcaaactggccgtgacaggcaaaaaacagggctgaaaatttggatttcgggaatatttcactacatttgccagaggttaatccaccaaggagacaatgagactttacggttttgcatattatttcttttactttttcttttatagcaagggaagaagcgggatggcatgcaattaactgtataaaacaatagagtgaaaacacgaagaatcccgttctgcagaagagcgggattttttaatgcgattcagaagatgaaacggataacgatacaggggatagcgggttgtttccacgagacggcggcgcacggaagtttccccggcgaagaggtcgaagtgctgccctgcgtgagtttcgacgagcagttcgcccgcatggcggccgacgcggagctgctgggggtggcggccatcgaaaacaccattgccggaagcctgctgcctaaccacgaactgttgcgccgcagcacgctgacggtcatcggcgagtacaagctccgcatctcgcacgtgctggcggcgcttccgggacagcaaatcgccgacatccgcgaggtacactcgcacccgatcgccctgatgcagtgcggcgaatacctcaaggcccggcccgcgatgaaagtcgtcgagcgcgacgacacggcgggaagcgcccgcgaaatcgccagccagcggctcgccggcacagcggccatctgcggcgccgaagccgcggaactctacggactcgaaatcctcgaacgcggcatcgagaccaacaagcacaacttcacccgttttctggtactggccgaccgcagccgcgcggcggagttcaccgatccggcccgcaccgacaaagcgtctttggtattcacactgccccacgcgcaggggagcctctcgaaagtgctgacgctgttatccttctacggaatcaacctcacgaaaatacagtcgctgccgatcatcggacgcgaatgggaataccggttttacgtggacgtgaccttcgacgacccgatgcggtaccggcaggcggtcgatgcggcccggccgctgaccagcgatttccggattctgggcgaatatgccgaatatcccaatcccgaaatctgagcggaaggacataggacccgattttcgcggcgggcggggacagagacgcaaacgaggcggcaggctgcgaatgacgcgaaaagacagagacaagacaaacgacaataattcaaacagaactgatatgaaagatttgcaacccatcaattttccgggactcgatccccggcgcccgctggtcatcgcgggaccgtgcagcgccgaaaccgaagagcaggtgatcgaaaccgcccgcgaactggccgccgaaggcgtgcggattttccgcgccgggctatggaagccccgcaccaaacccggagggttcgaaggcgtgggcgccgaaggcgtggcatggctccagcgcgtaaaacgcgaaacggggatgtataccgccaccgaggtcgccacgcgcaagcatgtcatggcggcgctggaagggggcatcgacatgatctggatcggcgcccgcaccacggccaaccccttcgccatgcaggagatcgccgacgcactgcgcggccacgacattccggtgctggtcaaaaaccccgtgagtccggacctcgaactctgggtcggcggcgtggagcgcatctacaacgccggcatccgccgtctggggggcattcaccgcggcttcacgtcgatcgacaagagtctctaccgcaaccatccgatgtggtcgatccccatcgagctgcaccgccgcctgccgggcctgcagatcttctgcgaccccagccacatcggaggccgccgcgaactgatcgcgccgctttcgcagcaggccatggacctcggattcgacgggctgatcgtcgaagcgcactgttcgcccgactgcgcgtggagcgacaaggcccagcaggtgacgccgcagggtctggcctacatctgccgcagtctggtgatccgcgaagccaacaccacgacggagagcctttcggaactgcgttcgcagatcgacaagctcgacgacgaactgctcgaactgctcgtacgccgcatgcgggtatcgcgcgacataggacagtacaagaaagagcacaacatgccgatcctgcaggccaaacgttacgaagacctgctggcgcgacgcgcggagcaggccgtacagctgggcatggaccgcgaattcatgcgctcggtgttgcaggccatccacgaggaatcgatccgccagcagatgcaggtgctgggcgaatgacgggctgttacatttcggttaaatattcggcggggaccacgcaataaagggattgttacgtacttttgatgcggataccaatccgtaacagttatgacaaagcacaaaatccttgtggtggacgatgaggaatccctctgcgagattcttcagttcaatctcgaagtcgagggttacgaagtcgatacggcgtacagcgccgaacaggctctcggcatgcaccccgaacgttattcgctgattctgctcgacgtcatgatgggcgagatgagcggattcaagatggcccggctgctccgggcgcagcccgaaacggccgccgtgccgatcatcttctgcacggccaaagacaccgaggacgacacggtcgcggggctcaacatcggagccgacgactatatcgccaagcctttctccgtgcgcgaagtgctggcccgcgtgcgctccgtactgcgccgcaccgcaccgcaggagggccagagcagggcgatcgcgttcgaagggctgcacatggacctcgtccgcaaaatctgcaccgtggacggaacgccgctggccctgacaaaaaaggagttcgagatactcgccctgctgctttcgaaccgcggcagaatcttttcgcgcgaggagatactgcatcaggtctggagcgacgaggtaatcgtgctggaccgcaccatcgacgtcaatatcacgcggctgcgacgcaaaatcggcgtctacggagaccacatcgtaacacgtctgggctatgggtacgggtttgaggagtagcctctcctaccaccggcggctcttcctgctgctgctcgcgttttcgtgggcgctggtcgcctgcttcatcgtctttcagtacggccgcgaaaagcagttcaaggccgaacggctcgacacccgcctgcagctcttcaacctgcggatgctcgacgccctcgccgacggcgcgacgcctgaggagttcatcgccgcacgcgacgaaccgttcggcgacctgcgcgtgacggtgatcgacgccgccgggcgcgtcaccttcgacaattcggccggcagccttccggaaaccaaccacctcgaccgccccgaagtcgccgaagccctcgcccgcggcacgggattcacgatccgccgccattcggagagcaccgacctctactatttctattcggccatgtccgacggcggggtcgtcgtccgctcggccgtgccctattcgataacgctccgcgaagtgctggccgcagaccgcgaatttctgtggttcatgctgggcgtcacgctgctgatgagcgtggcggcctacttcgcgacccgccggctgggacacaacatcacgcggctgagagatttcgcccagcgcgccgagcggggcgagcggatcgatgagcaggcggtctttccgcacgacgagctgggcgacatatcgagccatatcatccggctgtacgcccgcctgcagcgcaccacggccgaccgcgaccgcgaacatgcgctggcgctgcacgaacagcaggagaaaatccgcatcaagaaacaactcacgaacaacatcaaccacgaactgaaaacgcccgtggcagcgattcaggggtatctggaaactctgctggacaatccggggctcggagcggagaagcgcacggcgttcctcgaaaagagctgcgcgcaggtggcgcggctgcgcagcctgctcgccgacatctcgaccgtcacgcgcatggacgaggcgagccagctgatccgcaaggagcgtgtcgtgctgaacgacatcgtggacgaaatccgcgccgacatgcagctccggcccgaagggcagcggctgcgcgtgaactgcgacttcccctatccgctcgaaatggagggcagcccctcgctgctgggttcggtgttccgcaacctcgcggacaacgccgcggcctattcgggcggacgcgacattttcatccgcctgctggacaactcgccggagcagtacacgctgcagttcgcagacaacggcatcggcgtggaggaagaacacctgccccacattttcgaacgcttctaccgcatcgacaaggggcgttcgcgcaagctgggcggcacggggctggggcttgcgatcgtcaaaaacgccgtgatgatgcacggcggcacgatctcggtccgcaactcggagcgcggcggactggaattcaccttcaccctgcacaaacattcatagagccgcaacccgtccgtaacacgtttgtaacatccgtttcgttcctttgcaccggaaagaccggcccgcaccgcagggcggcgatccccgcccaagacggcgggcgaaagcctcctccggaaaatggatgcagggccggacgaaaacatacggcggagcgccaaaacggagccgccgaaaaacaaacgacaaacgaccatatgagtcctctattcacaagcatcgtcatcgtcatgggcctgctggccgtgatgggcatcgtcgtgggcgtggccaacgacgcggtcaactttctcaactcggccctcggatcgaaagccgcaccgcgccgcgtcatcctctggatcgccgccgccggcatcctcgtcggcacgctcacgtcgagcggcatgatggaggtggcgcgcagcggcgtcttctatcccggacaattctccttcccggagatcatgatgctctttctgggcatgatgctgggcaacatcctgctgctggacatttacaacaccctcggactgcccacctcgaccaccgtgtcgatggtattcggactgctgggcgcgggagtcgccgcggcactctaccacatctggggcgatccggccgcttcggtttcggacctctcgcagtacatcaacaccggaaaggcgatggccatcatcgcggccatcctgctctcggtggcgctggcgttcgccgcagggtcgctcttcatgtacgtttcgcggctcatcttctcgttccgctacgcgaaggtgttccgccgctggggcgccgtatggtgcggcatttcgctggcgggaatcctctacttcgcgctgttcaaggggctgaaaagttcggggctgattccgacttcggtcggagaatacgtcggcgagcacgtgctcgtaacgctgttcgtcttctgggccggggcgtcggtggtgctctggattttccagcgcatgcggctcaacatcatgcgcatcaccatcctcacaggcaccttcgcgctggcgctggccttcgcaggcaacgatctggtgaacttcatcggcgtgccgctggccagctacgacgcatggcagatcgcccgcgaaacgggcagcgagtcgatcatgatgggcgaactggccaatccggcgcgcgccaacttcctgctgctgttgctgtcgggcgcggtgatggtcctgacgctcttcttctcgaagaaatcgcgccacgtcaccgaaaccgagctttcactcgcctcgcagcacgagggcgacgagcggttcggctcgaccttcgtatcgcgcagtctggtacgcgcctcgctcgcgctcaacaccatatggacagggctgattcccgaccgcatgcagaaagtcatcgaccgacgcttcgaaccgctgcctgccgaggagcgttcgtcggcgccctacgacatgatccgcgccgtcgtaaacctcacggccgcctcgatcctgatcgccataggcacctcctacaaactgccgctctcgaccacctacgtggtcttcatggtggctatgggttcatcgctcgcagaccggacgtggggccgcgaaagcgccgtataccgcatcacgggcgtcatggccgtcatttcggggtggttcatcaccgcgctcggcggattcctgatcgccctctgcgtgacgctgctgctgctctggggcggctggatcgccgtcacgacgctcgtcgctctctgcgcatggctgctcatccgcagccaccgcaccaagccggaggagaaagctgccgcggaggaactgccggtaatcaaggccgagactccggacgaagtgctctgcgtctgcatcggcgaagtatgcacgacgatggagcaggtgacgcgcatttacaaccggacgctggtcgccgttttcaaggagaaccgcaaggtgctcaaggagatggtgcagtcgtcgaacaggctcttcgaagaggcccgcgaccgcaaatacggcatcatgccgacgctgcgccgcctgcagcagtgcgacatcgacaccgggcacttctacgtgcaggtgacggattacctctcggaggtgaccaaggcgctgatccacatcacccgtcctgcgttcggacacatcgacaacaaccacgaagggctgtcgaaggagcagatcgtggatctgatgcgcgtaaacgatcaggtggaggcgattttcgacaaaatcaacgacatgctccgcacgaaggacttttcggatctggacatggtgctcgaaatgcgcgacaagctcttcgacaccatcgtcgaggcgatcaagaaccagctgcgccgcatcaacggcgacccggcagccagcacgcgggccagcgtactctatctgacgatcctcaacgaaaccaagacgatgatcctgcaggcccgcaacctgctcaagtcgcagcactacttcctcgaaagcagaaaataggcgcggcagaagacaggcctgcggagaattccggaccggacgaccggaagacagcggccggaaaacaccgcacagaaaacaccacacgaaaaacaacggacagaaaacacagtacggccgccaaaacaaagaccgccgctccacgaaagggcggcggtcttcttcctatatccgcatgctatttgacatccttcacgcagcgtacggggcaggcccatgtcttgctcggttcggcctcggttttgatggcggagacgctgtaagtcagcgcatagccgttcttgccggcagacgatgcgctccagcagtagcccgaagtacccgcttccgcgccgccgccggaacccgacgccgacatgatattgatatagccggccgcaggatagtacccgttgccttcggcaaaaacgcatccggtacgctccgcatcccacacgccgttcagatcggcccatgcggaagcggctcccgcgcccgaaacggtacgcgccacccgtcggggcacgggtcgaagacgcccttcgtaccgtcggcgttgctccagcggtagtcttcgccgccaaccgccggcgacagccagtccgaaacacccacaatatagcggtaaggctgccggaccgaagccacgagattctcggagggcacattcgacgaagcgaaacccctcagcgtcataaacttgccgataccgtcgttcgaccagccggcattgccgttaaggaacatcatccatgtatagggaccttggaacggatccttgcggccccactggtagaagcatccggcgctctgcggccccttcacgagcgaagtggcgcccagattgcggtccatgaagacgttgccgccgacggtctgctgccccgcaacctgcgaaggatcgtactctgtggcccagatatgccagctccagtagcagttgccgtcgccgttgagcagatagcgcacgtcctcccagactacgcgggcgcccatggctcccagcatgccggcgccttcgcccgccagcacgtcgttcttaccccacacgccgaaggctttcgaaacggggatatagagcgtctcgcccggcgatacgacgtaacagttggggagcagttcgggattggcgaaagcgggcgtaaccagcaatttgcggacctgaccggcggccagcgaggttttgcccggatgcgtatagtcgaacgcagcgaagccgttgccctcgaccttcagcagggccttgccttcggcgatctcctgcgccggcaggtaagcgcggaaggcgttgccgcagcgcgtcatcgccaccgaagccgtcttggcgtccacggactgcatttaggcatcttgggccgcggccgccagcgagaagacggctttcgtgcgcacgtcctgcaccgtcacggcgtaatcggtcagtttgtcggcgtccgcgacgaaggcttcggccagcgccagcttatggcggaacacgagtctgatctcgccgtcgcgctcgctgaatcccggcgtgcgggccgtcatgaagtcggcttcggcaaccgaagcgtcgtagacgagcgccgtcggatcggcattttcggcatagggatagtaggcatagaggtccatgacctgcccctgctccatgtaataggatttggagccttcctcacgccacgaaccgtcggcctgacggacgaatttggcattctggatgtagttgcccgaagcggcccgataggcctgcgtttcggcatcggagcggatcacggcgaagaggccgatggcgtccccctccacgaagcgggaggcataggcgacgtccgtttcgctcttggtccggacgaactccgccggctcggcggtcagacggatcgcggcgcacgaaggcgcggcgcacgaaggcgcggcgccggcggtctcctccttctggcaggagacgaccgaagcggcgcagaagaacaaagccgcagtcaacaaggatcgactgctgaatagtaacgtttttttcatatgaacagcgtttaaaagaatacttacggattcggggacggcaccgcctgcgcaaaacaggcatccgccaagcaaaacaaccaaaggatacgcaccgccgcaccgggcaggcgcccctcactaacctattgacaaaagtaaaagaagccggacgatttatgaaacgctctttttcggaattcgtaaaaattgacaaattccgaaaaaaaacaaaccccgaaaaacggggttgcgttcagagctggtgctcgcggtggagtttgagcagtttctcgcggtacttagacggcggcatgccgatcgcgctctggaacgaagtgtagaaggtttgcagatggttgtagccgagcgtctgggcaagcgccttgagcggcgtatcgtcatcgacgtcggaaagccgccgcacggcctcgtcgatgcggtagctgttgacgtagctgctgaaggtctttccggcctgctggttgatcgcacgggagatataggtgcggttggtgtcgagccgctcggcgagccgttcgatggtcaggtcgttctggcggtagacgccttcggtctgcatcaggtactcgatccgggcgaagagttcggcgtcgcgcacggcgtggtcgtcacggtcgggcgacggcttttcggtctgcggggaggtagggccgggggggggcatggccggctgcgcggcctttttctcctttttcaggaattcgtactgctgccggacgatctgcttgtacatcttgtccttgcgccggtagaggatatagaccaccgtcgagatgccgacggcgaagagcagcagcaacagcagcagctggaatcggcgctgctggcggatgaggtcgatttcgctcttgcgcagcatgttctcctgccgttcggcgtcgtacctgacccgcagttcgttgatcgaacgctcccgctcgacgttgaagatgctgtccgcctgactatggtagctcttgaaatagtccagcgcctcgcggtagcggcccagcgcggtctcggcctcggagatacgcaggtaaagcttatagcggtgcacggcgttgttgctccgctccgagagttcgatgccctgccggagcaccggaatcgcgcgggcgtactcgccccggtcgttcaggtaggttccgtaactgaggtaggtcatcacggcagcggtcacgaccttctcgtcgatgtggtcgagcgccatcaggtaatagcgttcggcgcccgcatcgtcgccctgcgcatggaggatattggcgtaaaggctgtaaagctcggtgtggtagccgaatttatcggtgtcgggaagcgtccggaggatgtattccaaagcccggtcctgatcgccgagcatgtagtgcatgtaggcgctgatgaccgcgccgccgaaagcgaggtagtcgtaaccccactcggtgcccagccggcagacctcctcggcgtatttcaggcccgcagggtcgttgcgcatgtaatacgtattggccagattgcactgcgccaccagatagaagcggttcagcgaggcgctgcgggcgtactccatcgcttcgaggaaatattcgatgcctccgaaatagttcgtttcgatgctgacggcatagattcccagcgcattgtaaatccggcacagcgccaccgggtcttcgcactgccgcccgcggatcaaagcccggtcgaggtatatgcgggtcgagtcgctgccctcggcgagcaggtaggactgcccggagaagaggtcggcgtacatcagcgcccgctcgtcgtcgtgcgcggcgccggccctgcggagacgcgagacgtagggatgaatggcggcgaattcgctccgcatggtgtattgggagcagatttcgaccagcaggtctatatcctcagggtcccgttccagccgctccagcagcgcaggaagcgtatcggcctgaatcaccgcggcatgcgaagccgcgccctcctgcgcgcggacggcaggaagtccgagagacacgacggcggccaatatgaacaaacgtctgaacatcgctggagatcggaaaacgggccgggccggagagtcggcgcactccgttttcgctctgctaaattaataaaaaaactcgaaaacgacgaaaaggcgcctttttaatccaaaaaggcatggtccgaagagcgggcgaaaacgggccgcgctgccgttcccgcgcccgcggacgcgacggcccggaggttcacggcaggccggaggtttgcccggagatttgcacggcccggaggtttgcacggcccggaggtttgcacggcccggaggtttgcacggcccggaggtttgcggcggaatgtcctccggcccgtgaaacggaaatgtaacggggccgtcatttcaaagtaacgacggccccgtatatttgcagtgtgaaaaccggacgaggttttccaagttggttttaggttacataagtaggttagtgggagatgcagcgacgcgaggtcgcggcatcttcgttattacggctatttctccatgtcgtgcaggtggatttcgagggcgcggaccgaaatctggatttcccagatcgacacgcccagcgaaccgatcagcagcagcaacgccgcgccgaagacataggccgaaaggacgaaaaatccgacatacagcaggaacatcgtcaccacgcagagaaaaaggctcgaaacgcccagaatctgcatcgtgcgcgtgaggtgtaggcggcggcgcaggttgtcgatctgcgcgcgggtgactttcgaggggtgctggaggtgctgctccttgagcgtgcgcaccagctgggcgtacgacagaaaacggttggtgtaggccagcagaatcagcgagacggccgaaaagagcagtgcgggggtcgtaagagtcagttcttccatgagcgaatcggttttgcggaattacggtcgccgtttcctgccgcttcgggtccgcggccgcagagcgttcaggcagggccgaagcggcatcatgccgggcacgcatctctgtgggcactcagcggggtgcatcttagcgggtgcggcgccagaaacacgggacggcttccgggacaaaggtacgaaatattccggtcaatgcgcccggtccgacaaaacagtgagcgttcgccccggcaaaacggcgtgcatccaccccgcaaaacagcgaaggtccggtcgggcaaaacagcgtgcatccgtcccggcaaaccagcaaaggtccgcaacatacacccgccccggtaaaacagcatacacccgtcccggcaaaactgcggcgggacccgaaggcaagatgcgcgttcgagacctccgggccgtattccgccgcatcggtcgcacatatcggcccgccggaatctgcggcggcaccggtccgccgggcccgacgctgccgatgccgcccgatcccggtccgcattcgtcgctgcaaagcaggggccaaaccgtaggccgaaggactccatcctgcagaaaaaacgctccggggcgatatggtccgacaaatcgcaggtattttttaagattttttaagaaaatgcgtcgcagcgttcggtattgtgaaaaaaataacatacctttgcgcatcccaaagaaaacaattttaatctcattttgacgaataataatttatggaattgaacaaaacctttatcgacggactttggagcaaggagatcaacgtgacgagtttcgttcagacgaacatcaccccctacgtgggcgacgcctccttcctgcagggtcccaccgaccgcacgaagcacatctggaacctctgtctcaaggccctcgaagaggagcgcgccaacaacggcgtccgttcgttggacaacaagaccgtttcgaccatcacttcgcacaaagccggctacatcgacaaagaacaggagctgatcgtcggtctgcagaccgaccagctgctcaagcgcgccatcaagcccttcggcggcatcaacgtcgtatcgcgcgcctgcaaggagaacggcgtcgacgtggacgagaaggttaaggatattttcacccactaccgcaagacgcacaacgacggcgtgttcgacgtctacaccgaggagatccgctcgttccgttcgctgggcttcctgacgggtctgcccgacaactacgcccgcggccgcatcatcggcgactaccgccgtctggccctctacggcaccgaccggctgatcgaagccaagaccgaggacctgcgcggcctgaccggcccgatgaccgacgcccgcatccgcctgcgcgaagaggtcgcggagcagatcaaggcactcaaggagatccgcacgatgggcgaatactacggactggacctgagccgtccggcgcactcggcgcaggaggccgtacagtgggtctacatggcctacctcgccgccgtgaaggagcaggacggcgccgcaatgtcgctgggcaacgtttcgtcgttcctcgacatcttcatcgagtacgatctggcccacggcaacatcgacgaagtgttcgcgcaggagctgatcgaccagttcgtcatcaagctccgcatggtgcgccacctcagaatgcagtcctacaacgacatcttcgccggcgacccgacgtgggtgaccgaagccatcggcggacgcttcaacgacggccgcacgaaggtgaccaagacctcgttccgtttcctgcagacgctctacaacctcggtccgtcgcccgaacccaacctcacgattctgtggagccccgacctgccgcagggattcaaggatttctgcgccaaggtttcggccgacaccagttcgatccaatacgagaacgacgagctgatgcgcgaagtgcgccattcggacgactacggcatcgcctgctgcgtgtcgtatcaggacatcggccgtcagatccagttcttcggcgcccgctgcaacttggccaaggccctgctgctggctctgaacggcggccgctgcgagaacaccggcacgctgatggtcaaaggcattccggcgctcaccgagggtccgctgcgcttcgaagaggtgatgcgcaactacaagatggtgctcaaagagatcgcccgcgtctacaacgaggccatgaacatcatccactacatgcacgacaaatactattacgagaaggcccagatggcgctggtggacaccgacccgcgcatcaacctcgcctacggcgtggccggtctctcgatcgccctcgactcgctctcggccatcaaatacgccaaggtgacggcgcgccgcaacgagcaggggctcaccgacggattcgacatcgagggtgaattcccctgcttcggcaacaacgacgaccgggtggaccacttgggcgtggacctcgtgtactatttcagcgaggaactgaagaagctgcccgtctacaagaacgcccgtccgaccctctcgctgctgaccatcacctcgaacgtgatgtacggcaagaagaccggcgcgacgcccgacggacgcgccaaaggcgtggctttcgctccgggcgccaacccgatgcacggacgcgacaagagcggcgcgatcgcttcgctggcctcggtggccaagctccgctaccgcgactcgcaggacggcatctcgaacaccttctcgatcatccccaaatcgctgggcccgacgcaggaggagcggatcgagaacctcgtgacgatgctcgacggctacttcaccaagggggcgcaccacctgaacgtgaacgtgctgaaccgcgcgatgctcgaagacgccatggagcaccccgaaaactatccgcagctgacgatccgcgtgtcgggctatgccgtgaacttcaccaagctgagccgcgaacaccagctggaggtcatcagccgcagtttccacgagcggatgtaagatgataaaggtacactcctacgaatcaatgggaacattcgacgggccgggactccggctcgtcgttttcctgcagggatgcaatttccgctgtctctactgcgccaatcccgacacgatcgacgcctgcggcggcacgcccacgtccccggacgagatactgcgcatggccgtggaccagaagcctttttacggacggcggggcggcgtgaccttttcgggcggcgaaccgacgtttcaggccgcggcgctggcgccgctggtgcgcaggctccgggaggcgggcgtccacgtctgcatcgacacgaacggcagcatctggaatccggcggtcgaagagctgctggggctggcggacctgatcctgctcgacgtgaagcaggccgatcccgaacgccacctcgcgctcaccgaacgcgacaacgcccaaaccctccgcacggcggcatggctcgaagaacacggcaaacccttctggctccgctacgtgctggtgccgggctacagcgacgccgaagccgacatccgcacgctgggcgggcggctcggcggctacaggcagatcgaacgggtcgagctgctgccctaccacacgctcggagttcacaaatacgaagcgatgggaaaggagtacaaactctcggacgtcagggagaatacgccggaacagctggaccgcgcggcggcgctgttgcgcgaatatttcgcgaatgtggtggtgaactgacgcccccggccgacttcggcggcggcctgctgaattgctaccagcactccgccttgtctttcaactcaggaatccggtctcgcgtgtagaccggatttttgatgccctgccgtttctgggcgacgtaatcggccagcagcaggaaagcctgacgccccagcagcaggatagcggcgaggttgaagagggtcatcagcgccatcgtaatgtcggcaaggctccacgccagatcgagcgtggcaagggccccgaacagcaccatcgccccgaccagcagccggtagagggtcagcgcgcccggacgacgggtgatgaagcggatattggcttcgccgtaatagtagttgccgatgatactgctgaaagcgaagaggaagatcgccacggcgacgaagacactgccgacggggccgatttcactgaccagcgcggcctgcgtaagccggatgcccgacagcgatgcgtcggggacgccaccgaaaaggatgatgaaagccgtgcaggtgcagattacgagcgtatcggtgaagaccccaagggtctggatcagcccctgcttgacgggatgcgagacatgggccgtggcggcgacgttgggcgcggaacccatgcccgcctcgttgctgaacagcccccgcttgatgccctgcatcagcgcggctcccacgccgccgcccatcgcctgctcccagccgaaagcgttggcgacgatcagctccacgacttcgggcagccgccggaaattgaagagcaccacgcccagcgcaagggcgatataccccagcgccatgaccgggaccaccaccccgctcacgcgggcgatgcggtgtatgccgccgaagataacacccagcgtcagcagcgtcagggcgatgccgacccaatggtggtcgaagccgaaagcgccctcccatgcggcgcagatcgtgttgctctgcaccgaattgaaggcgaagccgaacgtgacggagatcagtacggcgaagaccacgcccatccagcgccggcccagtccccgttccatataataggccggaccgccgatataggaatccctgccgcggcgtttgtagagctgggcgagggtcgattcgacgaaggcgctcgaagcccccagcagggcgatgatccacatccagaagacggctcccggaccgccgacggcgatcgccgtggcgacgcccgcgagattgcccgtaccaacgcggctcgccagcgagacggcgaaggcctgaaacgacgagacatgccgctcgccccgccgtccgccgcccgccgactcccccagcacgcggagcatctcgcgcagcatgcggaactgcacgccgcgcgtacgcacggtgaaccatacggcgcagcctaacagcagggcgaccagcagataagaccaaagcacgttattgaccgagtcgatccagaagaaaagggtttgcatggcggagatgtttcggacaaaggtagcaaagttaatgctaaaacgggagaagaccggaattccggtcttctcgaagcaaatcattcggcggcatccatccggatcgtctcccccgtccggcggctgcgttcggcggcgtagcagatgcggtggctctcgatcgaatcgtcgatcgtggtgaggaacggccgcgaggggtcgcggagcgcgcggatgaaatcgccgatcagctgcaggtcggccccggcgtggaagggctgtccggcgatgtccgagaaatcataggtctcggcatccccgccgcggaacctgcggacccgcagcgtacgctcgtcgccgtcgatctcgccgcccgtgagccggatgtgggtcttgcggaaatcgtcgttggtgaacatctccatcgaaaggctcatcgtcacctcgtcgtccatctccatcgaaagcagctggtgatcgaccacgtcgttgtcgcaacgatagacgcagcggcccagcattcccgtgcgcagttcctccataatcgtcgcatcgagcgtcgctccgggcggcacgtcgaagttcgagacccagtcgcggcggacgtagtagaggtcgcgcgccgagaaggggcattcggattccatccggcagtcgagacaccgcgcggcggagccttcgggagcattctccgcacggaaccagcgcagcgacccgaacgacgagagcaggcggcagtgcgaacccgtcagccacagcaggaagtcgatgtcgtgacagcatttggccagcaggatcggattggcttcgctctcgcgccggaagatgccgcgcacgtagctgtgggtggcccggtcgagtccgaccgaagcggtatggttgaccgaaacgacgtgtcccagccgccccgaagcgaccagctcgcggatcttggcgaaatagggatggtagcgcagcacatggcagacgccgaccagcacgccgcgccggcgggcgcgccgggcgatttcgcggcattcgtcgagacgctgggcgatcggcttttcgagcaggacgtggtatccggcgtcgatagccttcacggccgggtcgaaatgggcgttctcaggagtcgaaatcagcaccatgtcggcatcgagcccctcggcgaagaagtcgtcgtaatgggcgtagcaatacttgtcgggaagcccgaaagcgtcggccatggcgcggcggcgcaggtcgttgacttcgacgatcgcggccaaccggagctgttcgggattccggcgggcgtattcgaggtatttatgcgcccggttgccggcgccgatcacgacgatccgcacgggccgggagagggttgtttcagttttcatcggatgttgcggaaattacagcggctgccacggctccgtccgccgcatcgcggcgttcgatgcgggaggaaagacggatgctaagttcgtagagccagtaaagaggtatgataaccagaatcaggctgaaaatgtcgggcggcgtgatgatcgcggcgatcaccagcaggccgacgaaagcgtgccggcggtagcgtttcagaaacgacgacgagaccagccccatacgggtcaggaagtagaccagcagcggcagctggaacaccagcgccgaggccagcgatgcgacgatgacggtcgaaaggtactgattgacgtcgatcatgttcacgatcgaagcgctggcttcgtaattgatgaagaagctgaccgagagcggcacgatgacgaaatagccgaagagcaggcccgtgaagaagcaggccgagatccagaatacgaagcggtgcgtggcggcgatttcgcgctgtgtgagcgcgggcttcacgaaacgccagaactcccagaggacgtagggcatggccagcacgagacccgtcacgaacgagattttcatgtgcaggttgaactgccccgccatggcggtattgataacccggaaatcgaggttcgagacgtcgaacgcttcgggattgacgctcagcgaaagtcctgtcaaagcgttgatccaaccgcagagcgcggcgaggccgtgtccggtctccagcagcagccggttggtcgggaaaccggcgctcttggggccgaaaagcaccacgtcgatcaggaagtgccgggcgaaaaatgcggcgacggcgatcacgacgacagcggcggcaccgcgcaccaaatgggggcgcagcgccgcgaaatgggaccagaagtccatctccgcgctttcgtttccggcgttgggtttcgacatatcggttcgttggggaattcgcgccgtgctccggactatttatccgccggtttgtctccggggacatccgccggattcggcttcttgttttcggacgaatagtccgtattcatggcgtccttgaactcccgcacgccgcggcccatgccgcgcatcagttcgggaattttcgcgccgccgaagagcagtatcacgacgaatacgataatcagcagctggccgtatccgatcatacagggtataaacatagtcttgcagtttttgcgtttcacaattgcggcccgcgccgcatccgtgcggagtccgcctcccgcacgggatcatccgcgcgggaggcgggcagcgccgtctattggcggccggcgctcaggtccagcacgcgcaggttgcggaactggatgcccgcaccgtggcccagcagaccgagatggcctttcttattgaagagtccgggatggttcttgccgtccacggtatagggattcttcttcgagccgtcctccgagacgttgtgtcccttgcaggcttggcggatatcgccgtcgaggatcacgcggccgttgaccgtgaccgtaatgcggtcgcccacggcgtgtatctccatcgtattccacgtccccagatcgccgaacacgacgtgttcctgcgccgggatgatgccgtagacggagccgtgctgctggtagatgcgcaggttcttgtagatcggcgcgtcgtggtcgagaatctggatttccatgccgtgataggcggcgtccacgcccatcggcgtacggatgccgatgccgttgttgacgcccctgcgcaggaagcggaattcgaagcgcaggtcgaaatcgccgtactccttgaccgtatagaggttgcccgatccgccgtaggaggcggtcacgtcgatcgtgccgtccagcggaacgtaattgaccgtgttacccgtccatttgtgcagcgaacggccgtcgaagagcacttcgtagccctgcgccgcctcttcgggcgaaagttcgaaaacaggcgtcgagggcagttcgccgatgtagaggttgcggaagcaggcaggagccgccagacccgacagttcgatgcggccgcgtacgcagaccggttcgccgggagcgcaggggttcgtcagcacgacgttctcggccagcgtcaccccgttctcgatcagcgtgatgcggtcatcgacgacctttgcgtagagcgtattccatgtgccgggagcattgtccgcagcggcggccggggtatcggtctgcccctgagtcttcaggccggtgccttcggttccgcccagccggatttgggacatcgaacgtacggcaagcccggcttcgccttcggaacgccattcgagccagagttcgaaattctcgtattccttttcggtaccgatcgtactcggagccttgcctgcgaaaacgagggcgtttccgtccgcgctccagttcgcggccatcgcttcggcggcggctttgcgcaggccggcgatccggcgggccgaaagtttccgctcaccggcgggatcggcggtcacggcggtccatccttcgagacccgcggtcggaagaagagcgaagcccgcagcggggattttgccgagcagtccggtgatctcatcgacggcgtatcccgcatcggcgtcggatttggccagctccctgtagacctcgcgggcctgctccagcgcactgcggacagcctcgccgcccggcatcggagcgctcttggcgacgatcgtcttcacggccgcggcggcagctccggcggttgcggggtcggagaggtagtcggcggccagcatcagggcgggcacttcatggacgcccgcaaggtagccgagcagtttgttccgcacggcggccgagggtttgagttcgagtccctgccggtagagctggcagcggcggaccggagtcgcaggctgtttggcgcagaggtcggcataacgcatcagggcgcggtcagccagagccggattttcggcggcgatgcggtaaaggatatcggtcatcgcagggctttcgaccgtcagcagggcggcgaaagcggcttcgcggtcaccctcgcggaatccggccagcaggctggcgacggcttcgggggtgccggtctgcgccagcacgggataatagcgcgccggaattttcgacgcccgcatgtagccggcgatcgcgccgtagcgtttgtcggccggaagctgcgccgaagtgcggatcagcgcggtctggatttgcgccgcatgctgtccgtcggcggcatcgagcagtccggccagacggtccatatggcggggtccggtcacataaggaagagcggcataggcggcttcgcgcacctgcttgtcggaagtctccagcagtgcgaagacgcggtccgcggccacggtcatgcggcgtgcggcggccagcctgagggccggaacgagcacctcggcgtcatcccgcgcaagcagccgctcgaccatcgggtcgatgcggccgttgaaggcaagcagggctttctcggcggcttcggcacgaggaccttcgagcgccgagaccagcgctgcgagcgcctgctcgccgccgatgcggcccgaagcttcgatggcggcccgtgcgacccggtcgtcggacgaagtcacggcgcccgtaatcacatcgctctgcgacacggcgccgcagtcacccagccacgctagcaccgcggtccgggtttcggcgtcatagcgcggcatgccggcggcaacccgcgcaaagatctcgtcgtcgcccttgccgagcgtctgcaaagcggcatagcggtattcggcaggtccctccttgacggcggccagtacgtaaggcatcgccttttcgatgccgagcgcatcggcaagcaccgcgagagccgcgccgcgcacatactggcggtcgcacttgagcaggcccttggcggctttcacggccggctgggcgtctcccgcggccacgaggttcgcaagcaggcgcagataggcatcggcagcgccggtgttatcccagccgtaaccggcctcggcggctgcggcggccagcggtttgagcgaagcgcgcgaaccgcagacagccagcgcattgtaaatctgttcggccgtccgggcgtcggcgccgccgagccatcccagcaggaggggttcggcctgcgtcatccgcttttcggcaaaagcataggccagcgcgcgtttccgttcggccgcaaggccctccttgcgggcctcggcgagcagaaccggctcggtgccgggcgtcgaaatcagcgcacggatcgcatagtcggacagataggagtcgtccagataaggcagtatccatgccgcgtcctccgccgcggaacagagctgcagctgcgagaagaggaaagcgcggttggcgttgtcggcgcagcgttcgatcgcccgaaccagtcccttgcggacatcggcgcacaaggcttcgtttccgggggctgtcgcgtaggcagtgatgccgttcagggcgtattcgagcgtcgcgttcttacccttgtcggcgggagtgagcatgccggcgatcatttcgacaccggcgcttcccgtagcggcaagttcgcccatcacttcgttgaaaacggcgggcgtggcggccggaagctgggccagaccgtcggcaacgacggtttcggcgttgcgctgccgggcgtcgagctgctgggcggcggcccctgcgggcagcagggcgatcagggcgatcagggcgcccagaataaacagtcgtgtgattatctttttcatggtaacaggtgctaaatatgccacgggccgcgcatcggctgatcgatcagtcggttggcggcatcgtcgccgatgaagagttgggtgtcgggatcgaagtgcagggtgcggttcagccgcagggcgcaggcgcccagattcacgagcgtcgaactgcggtgaccgatctgctcgtcgagcgcgaatttgcgccgcgtacgcacgcactccagaaaatcggtgttctgcggttcgggatcgggcatctcggccagtttctccatcacgtcgggaatggtgcagcggaaacccttgtagaccttgcccagcggaccttcgatatagggcgtgtcgccctcgctttcgaagccctcgccttcgaggacgatctggcagccgtcgtcgtaggtatagacgattttacgccagatgcccacggcgtcgggatgctgctgcggagcgtccacctcgatcttgacgggcgacgtctcgtccttgcccagcaggtactgcacggggtccatgtagtgctggcccatgtcggtaagaccgccgccgtcgtagtcccaatagccgcggaaggtgctgtgcacgcggtgtttgttataaggcttgtagggcgccggtccgagccacatgtcgtaatccagctcggcgggaacaggttcaggagcgaggttttcccggcccacccagaagaacttccacgtgaatccggtggtgcccgaaatggtcaccttgagcggccagcccagcaggccgctgtcgatcagcttcttgagcggctcgaccgtcgtgccgagaccatagaaggtatccttgaagcggaaccaagtgttcaggcggaagatgcggttgttgcgccggacggcttcggctacgcgcttgccttcgccgatggtgcgcgtcatcggtttctcgcaccagatgtccttgccggccttggccgcctcgacggccatgatgccgtgccagtgcggcggcgtggcgatatgcacgatgtcgatattggggtcggtaatcaggcggcggaagtcgctgtaggcttccagcgtctcgccgaacttcttctgtcccagcgcaacggcgctttcgaggtgtttgcggtccacgtcgcagacagccaccagccggcagtccttgttgctggtgaagtggtagctgctcttgccgatgccgcccacgccgatgatgcctttggtgagctggtcgctcggagcggtgaacttcgggccgccgagcacttggcgcgggacgatcgtcagcagcgccatgccgcccagcgttttcagaaaatctctacgggaggtactcatgtttatcggaatgttagtagtttataaagtcgtcaggcggaaattgcgccactgcaccttgatcccgccgccgtcgtggatctgcaaggcgatgcggccctgcgcggcgccgatcttggcgtcggtaatgtccaccatctcctcgccgttgagccacgtctgcacccggtcgccctcgacccgcaggcgcagcgtattccactggccctccttgaggatgttctccttctcgtcgggaatctgaaccagccatccgcggccgtaggattcgtaaatgcccgccgtatcgtggcccttgggagccacctcgcactgccagccgtggaccttcacgggcggctcgacgaacgaacggaagaagacgcccgaattgccgttggcgagctgtttgaattcgagcgtcaggtcgaagtcgttgtaatattcgcgcgtggcgaggtagccgtactccttgtcgggaccgctctcgcagacgaggttgccctccttgtccacgtaccacttctccgtgccgtaggcttcccagcccgtgaggtcttttccgttgaaaagctcgacttcacggcccgccttgcgcggcagctccttgatcttcaggttacggaacgaggccggatagccgtggtcctgcaggcagatgacgccacggcgggccagtccgtattcgggagccgtctcccacttgccgctgttcttgcgggcgaaccagtcgtcggtgtaggcatcgaattcgaggatcttgtgtccgttgagccagtgttcgacatggccgttgtcgcagacgatgcgcgagttgttccactcgccctgcgggttgacgaacatcgaatcgggatcgggcaggtgcatggcgtaatccacgcccagccgctgccactcctcaagtttggtaggagcgttctcggcctcccagccgtcgttgtcgatcagctggtattcgggccccgtcacataggggaccttaaaatagggatcttcgagcacgtggtagagcatgccgctgttgccgccgtaggagagtttccagtcccagtcgaggatgaagttttcgtactgtttcttggtgacgatgtagcccgaaaggtcgctgccgtcgccgttggcctgaatgcagccgtccacgacgtgccacggctgtgtgagcgaatcgccgttgtaatctttccactggtcgagcgtcttgccgtcgaacagcagctcccagccgtcggcggcctcggcttcggtgagcacattctggggcgacgcgcacgaaacgcccgtcgcaagcagcagcgcgaaaccgcacgtccgggcgagtccgctgcaaagattggatcgagataacataagtttaaggtttatcggttcttttatatattggtgtcggccttcatccggaggggtcggctccggcatcgtcccgcgcccggcggcaggccgcggcgaagggcgccgtccggaggacagactcgtttagggcctgcgtcggacggtcaagacaaagttacctttattttatgaattttccagcgtacatatcgaactatatagaactatataggtctatataaaactgatttccagaaaaataaaaaacacgcccaaaccccggattatatagactccggacatgtcacaaccctgttttcgagacctgttcctcgaaattgtcacggtcgagagccgcattgcgcagcttggtgcggtaggtatagaccgtcgccgaggcgcagttgagcagcgaggcgatatgcccgctgtcggtaatccccagccggatggcggccagaatgcgcagctcggtagtcagcgacgaatcggagcgcggcgtaaaccggaactcaggttgcagcagttcgttgacctgcccgataaagttggggaagatatccagaaaggagctgtcgaacgactggtagaatttctggtactcgccgtcgatcacctgtgacgaattgagacgccgcacgacttcgtcggcgcccttggtcttggcgatgcggcacacttcgcggcggaaggcatctatctgcttgatataatggaccgaaaggtcgatataatgacagacgtagcggtccttgatgcggttggaatcgaccagcgcgttgttgatgtcgcggatatggtcgttctttttcagcagttcgtcgtgcttctcgcgcagcaggtcgctcatccggatcagctgttcgtgactgccttgcagacggcggtgctgccagaggacgaaccacaggatcgcgatcagcacgatcaggaaaatcccggccagccagatcgtgcgggacatcagcctctgctgctgggcgatattcgaaatcacggcctcgttgatcttcaccaccgccgaagaggagttgggaatccgcgtcaccgatttgcagcggatcgcgtcgtcgaaggtcgaacccatgtaggccgtcgcccggtcgtaatccttgcggtcgaagagttcgagagccagatcgtacagcgacgaataggagcgggtaccggcgcgcaggtcggatatggaggattcggccagataatagagcatccggtcctcgtcgccctgccccttggcgatatgcgccatcgaatagtagacgagggcgaaattctggtggctcaggtttttggccgtcagcggttcgagcagttgcagagcctcgtcgtagcgacccgtttcgctgagccgcgcggcagccatgcgcgtacgggtctggtcgctgcaacccggcaccgagagcttcctgatatgggaaagcgtatcgccccacgccctcttctgaagggaatccgcggcttcgtcgtagcggcgcgaagccaccgaactgtagcgcgaatgccaagccctgtattcgccgggcgtcataccggccgtatcgatcttccggaaaagctcctcggccagactgacctgcccccgccccagccagacgtcgatgtcgcccagcagggcgaagcggcgcacgtgccgcgacccggtccgctcggccagccggtagagccgttcgacataataagccgaagaatcgaggtggaaagtcacgtaaatctgcgcgacggcaaagagccgttcggcacgctccaaaggcggcagtccgtcgtcgatccggctgcgcagcgcgtcggcctgctcctgccgccactgctggtagcggggcttgttggagagttccgcgtcgagccgttccaatgccgcctcggtctgcagcgaatactccggacggtcggcacaccccggcaaaagagtgcacgccagcacggtccacaagaatccgaaggagaaaagaaagttccgaggttgcatcgtcgtaattttggattgaacaaaattaaaacaaatgcccggcattacaaactttccaaattattttattccgcagtccgggaaatccgcggtccgggaaatctcagatcctaccatggaaactctccgcgcggcggcttccggagcgggtgcaaaacggaaagtgagccggaccgtccgtctcactttctgtcataaagactcccgtaaaaattcgggtgcgacgcactacagcccctccgacccgattctgccgagcagtttcgccgggtagttcgtacatacggccttcatcttggggtaatatttcaggacgtaggtcatttcggggtccgtatcggcattgtagacgctcagcgcgacaccggcgtcgaggtagctctgcagcgggtacttcggattcgaaacttcggcgccgccggcaaagaagttcgagtagtcgaggttcgcccacggatcgagataggacttataggccgaaggcgccgagtagctcatccagccgaccttgatgccggccagctgggccgcggaataacatcccgcccagatggcggcattgcccgaaacgatgaactcgcagaaatgctgggccttcttctccctgatgatctcgcaggcccgcgagcaggccttgaccgactcggccgtgttggaggtcgcgccgcccacctcgatccgtttcacgtcgagccagagccgcgtcgttccggcatggagcgccacgtcgataaactcctccaacgtcggcagcagctcgccgttggagagcttgcccgcggcacgcagttcgtcgagcgtgtgttcccacggcttgaggttgttcacataacagccgttggcggcatgcgcgacgacgacgttgttgtcggcagtccagtaaatatcgcactccgaggcgtaacaccccagactgatggcgtaactgagcgaagcgatcgagttgtcgggatatttggcggtcccggcctcggccgagccgccgcggtgggcgacgaccttgttgttcaccttttcgggaacgggaatttcatcgccgccgccgttatccgaaccgccgtcgggatcgtacacgggatattcgaccgggtacaggtaatcgtcgtcgcagcctgccagcgaaagggaagcgcccatcgcaaacagcaggagcagtttcagtactttcataattcagattcgttgttaagatccggccgcagggcgggtatgccccgcagccggtcggtccttaaaaattctcgtaattcttgacgcagcggaacgacgccgagcagtcgccgatattataggtggtgctgacggtcaggtccgcggcattgttggtcagcgcattgatacgccagcactggtagacgccgctgctcaaaccgcccggatggcagatgaacatctcgccgcgggaagcataatactgatacccggacttgaacagccggcggccctgcgggaagaagtcgaatccgaacgcatcggcggccgcgtggcgcgtcggcgccgcactccacccttcggccgaacgcagcacatcgggcacgctccactttccgatcatggcgctgagcggattcggcgtcacgcccttggctgcggccgcagcgcagagcatgtcgtagaagtcctgcacgttggctacatgccagccgtagggacagatgccctgaatctgcatcgaaagactcggcgtattctcgaaatcggcagaggcaagcgacttcacgctgctcacggggatatcgttgccgacggcatcgacgaacgtactgccgggacggtactgcgccggccagtccgtaagcaggcgcgccagctcaacggcggccttcggggtgcccgtcaggaactcggtcagcgtatagatgcggccgtatttggcggacatctccacttcgccctgcgccttgccgccgctctcgacttcgtcgtaatcgctcacacggaccgtctcgtagctgctgacgttcgacgtatagccgccgacgttgttcgcatcggagaccatgcggctgccgagcttgatgccgccgatattctcgccgccgttccagtcgagacccgcgcgcatccagaccttggtgcggccgttggccgtgtaggtcgaggtcgcgtatttcgccacttcactgtcgggcaggcagttgggagtcgtgatgcgctcgatcgaataggtcttctcgttcaggttgagcgtaacgatccgcagtccggccacatcgaccgtcaggtcggtttcggctgccgagagattgccggcgccgtcgaggtggtaggtatcgccttcggtagtgtaaaccgagaaacgtccgttcttgacatagacgctgtccacatacacccggtcggaaagtttggtcatctgaccccacttctcgcgggtcgggtacttgggcacgccgctgccgtagaggtagcagtagacgtccttgcgcagctgggtgacgggaatgaccgtccgggcttcgctcgtgtcgggcgtgccggccgtgacggtgatttcggccgtgcggtccgccgtattgtcgccgtattcggtgcaggtcaccgttatcgtgccgtcgccgttatcgacgaccgtacaccagtcggaatcggacacggccgcaaaggtatccatattggtgtcgatcgcaacggcagcgggctgcggattctcggccatgaaggtcagcgattcgggcgcggccttcacataggcgtcggcatagatgcccttctgcacgaccgggacttccagcaccgtgccgtcggatgccgtgatcgtaagtgtcgtctgacgtttgtaagccgtattttcgaggaagacgaggacaacggcgtcctcataaacggttcccgtgctttcgccggggaccttttcccggaccgcggtcacccatgcggactggaccgaacaggaccagtccagattccgcttcgatttcggcgcgagcgtgacgaccacattctgggtcgcggcggcgctgccgaccgagaccgtcgagggatagatgctgatgagcgtcgccgtcgaaagcaggtcatcgtcggtatcggtcgaataacagcccgcaagcagcatggctgcggaaagcagcgccgccgtatatagcattcgtaatgttttcattctgagtcagcttttttcattaaacaatacaccgttacgaccagccctgtgtctgcgtgatcttgttgttcttgttcatcgccttcttcgacacgggcatcagcagctggttggggcgcgacgtgtcgatgccgcactgtcccagcccgtccacatagcggtaggggttgtaatcatggatcgcccccagacggatcagcgtgaaatagacgttgccctcttcggcgaactccttgaggttctcgtccacgagcgcctgccggacggctgcggccgaggagtcggtatagaaattcgctttgccgtaggcgcgctgcgccagcgtattgagggccgtgagcgctcccgaatagtccttccggtggtagcgcagttcggccagcatggtgtaatactgcgcatagcggtagaggatgaaatcctgctcccagactatcgtgcccgtagagatattgccgatgagcttgttgggccactggatgacttcgtacatatcgctgacgcccgtgcgctccatgtaggtcacatcggtccgctggtcgcccagctccttgctccgcttgaggaacccgatgaagtcgtccgagtagaggaaccactggttcgaactgacgggcaccccgtcgggagcgttgcggtactcggccttgatctgggtgctgccccagatgaagtaggagaagtagctgcccgacgtatactcgccgttctccagatgcagggcgaaagcgatctccctgttcttcttgttcgagatgctgaacacgtcggcgaaccggtcgagcaggccggccgactgcaccgcgcccaaagccgtctcggccatggtcaggtagccgtcgccgccgcccgccgcatacatccagagcgcgaagtcggcacggagcagattgacgttgtcggccgtcgcatagtagcagcccttcgcattggtcctgatataccccgccgcagcgttcaggtcgtcttcgatccgggcatagacctcggcgaccggatggcgcgagggatagatcgcctcgccggttccctcggtcggagtcgtaatcaccggagcgtcgccccacacgcgggcgatccagaagtagcagtacgcccggatgaaacgggcgttgcccagacagtagttcatattgtcctcggacatgccgattccgggagcgtatttgagcacctgattgcactggtcgatggtggtgtaaagatagctccagtcggtcgaggcatcggaggcgctgagggtgttgagcatgacgtccagcatgtcgttgtcgcacagcgagcggccggtgcccttgccccacatggccgggccgacgcgcagttcgccccagaagaaaggattggccttgctttgggcgaacgcctgccgcaggcggtagtagatgccggtagtggcggtgagggcgtcgctctcgctggtccacatgttggtggtgttgagcttgtcggactgcgtgacgtcgagttccccgtgacaggaagtgctcagcgcaaccgaggcggcccccagaacagaaaggattattccatatattttcatagcattcttgtttttagatcaccgaatcatccgcattctcagaaggtcgccttgaggccgaagagcaccttgcgcgtcggaggatagttgttgaacgaagtggcgctcgaactggtaacgctgtacatgcccgtcgagctgccgaccgaggcggattcgggcgaaatacccttgacgccggtccagtagcagagcgtgttgcccgacacggaaacggtcagacggcccagaccgaccttgcggatccagcgcagcgggagatcgtaggagagcgtcacgtcgcgcaggcagaggtaatcggccttctgcacgttgatattcgaaatgcgcgagtagttgcggttgccgccgtcggcgtcgttgggagtcaggcgggcgaacttggtgtcgtcgccgggcttctgccatgtattcagggcatcgtagaccagattccagttgcagttgcccatcgaggtctggaagcagcgcgtatactggtagttgtagatcgaatgtcccagcgcatagtcgaggtagaccgaaagggtcaggttcttgaatttgaaggtattgttcataccgcccgtcgaatggggcacgacattgcccagcaggaacatgtcctcgccgttgatctgctcgcggccgtcggccgtaagcgccgaccccgcgcggtttttccactcgtagtcgcccacgtccttgcgtccggcgatcgacaggccgtccgaacggcggtagccgtgcgagttggagtcgtaaagcgcggcgtcggcctgcgcctcggattcgatgatatgggaggtcttgtagccgtagatgcgtcccagcggctcgccgacggccgtgccgccgaagcggtagcccgactcggacatcgtatagccgccgatgcgccatgcgtctttgccgtcgatatccttatagtaatactcgtcgggcagcgacagcaccttgttggcgttgaacgagtaggtgaagtcggtcgtccagctgaagttcttggtgctgacgttcaccgacgaaatttcgaattcgagcccgtagaagcggatcgaaccgacgttctgcatggccgagccgtatcccgacgtatcgggcagcgagacgtcgaagagcaggtcttccgacttcttgctgtaatagtcggcggccacgcgcaggcggttgttgaagaacgccatgtcgagaccgatgtcgaactgcttggtcttctcccacgtcaggccgaggttgggcagcgtcgaagcgagcgtagcgcccgaaccggcatagatgcccgtcacgctgtaggcgccgagcgtgtcgtaataatcgacgttgttgttacccgtcagaccgtagctcaggcggagtttcagctggttgaacttctcgacgttccagaacttctcctcggaaacgacccagccggccgaaacagcggggaaatagccccagcggttatccttggcgaagagcgacgaaccgtcggcgcgcatggtgaagcccagcatgtatttctccttgtagttgtagttcagacgtccgaaataggagatctggcaccacggcgtctgggtgtcggtccatgcggtaggcgtggtgcccgcccccagcgtcggggtcttgtcggactcggcgccctgcacggtcatcgacatgccgttgatcttgcgcttgaggaagtcgtatccggccatggcgctgagattgtggtcgccgaaggatttgttgtaatcgacgtgcgcctgaaaactcaggcggttggtctgcgaccacccttcgtaggtctggcgggtctggctgatggcgttgccggccagatactggtagctgttcttgtaggagttgtggttggcgatctgggcgaaagccgacaggccgtcgacaatgtcccacttgaggttgaagttggccgtggagcggcgggtcacatagttgttggtatagtagcggtcgaaccatgccgccgagatggtcgtactgttggtgccctgaccgggctggccgtcttcgaggtagtcgcggtgggtggcgggcatgaacatgccgcggcccagaatcgtccagtagttgccgatgccgctcgaagggatctcgttgccgctggtctccgagtagtcgaaggtcgtaccggccgtaaggctcttggtgatcttgaaggaggtgttgccgtggaacgtaaagcgggagaaatcggtgttgatgccgatgccgccgtctttcatgtagctggccgaagcggcgtaggtcaccttgtcgctgccgccgttcacgccgaggtagtactgcatccagtaggagtcgtcgaaccactggctctgctggtcgttatcctgaaaaacgatgatcttcgacggatcgaccggatcgaccaccgaactccagccgcggggcacgctttcgccctcctgcaggtagcgggtcgtccagatcgacgaatcgccgttgccgataccggccgagttggcgcccgtcagcacctgctgtccgtaggtatatccggggcagtcgttcagcgcgcggcgcatggtgacgacatagtcgcgggcgtccatcaggtcgaatttcgtcgcgggcgaggtccatgcggcctgcgcctcgaacgtaatctggggccccttggcgcggttacccttcttggtggtcaccagaatcacgccgttcgacgcgctggctccgtaaatacccgccgaagcggcgtccttcaggatctcgatcgactcgatgtcgttcgtattgagtccggtcatctcgcggcgaacgccgtccacgatgatgatcggcgcattggactggttgattgacgaaccgccgcggatcaggaacaccggatcgctgcccggctggttgttggccgtcgagacgcgtacgcccggaaccttgcccttcagcgcatcgccgatcgaattgaccggaacaccttccagatcggcgccgctcaccttcgagacggcgctggtcagcgtgcggcgcgactgggtgccgtaaccgatgaccaccacgtcgtccagcacgttgttgtcctcggcgagccgcacgtcgatctgcgtccggttgccgaccgcgatctcctgaggctgatagcccagataattgaataccagcaccgaacccggaccgggaacgacgatttcgtaattgccctccacgtcggacgaaacgcccgtctgggtgcctttgaccatgaccgtcgcaccgacgatcgactcgccggcgccggcggttatccggcccctgacggtcagcctacgaccggaatccgattgggggggggagttttgccgggtcaggatcacgacgccgtcgacgacctgccacgcgatgcctttgtcggcgaacagcggaccgagaacggcatcgacagcgccgccgtccacacggatttccacattgccgagcggcatgacgccgaccgacgattcgtacgaaaatgcaattccggtttgccgggtcaccgcatcgaccgcttccttgacggttgcatttcgcagggacagggtgacattgtagtgttgtgcatacagctcttcagccgccgacaacgtaaagacgttgcacagcaacagcatcaacatacagcatcccgtccgaaaaacagataaatttttcttcatgattaggactgtaaagttttaaactgatcgaggaaagcagcagcaccgggcccggatgtgccaacatgattcggatgaatggaatcagggtttagttcataggcagttgaaaatttaggtttctattcagctattcggtttaagtcgtttcttgtttctattccgcgccggccgccggagcgggacggcatttcacgcccgacatcttctcgatgatgtccagcacgtcatcgagcgtattggacttcaggaagttgaagttatacagccggtcgtcgtcgagaggcgcgacggtctctatatcgacgctgtagatctcctccaccttgcggatgatctcggccacacggacatcggacatcgagatcatgccgtacttgagcagcatcagatactccacgttgacctcggagatggagatgtcgtgcgaagcggacgaatagtagatcttctgtcccggctgcatggtaatcatattgtcgttgtcgccgaactggagtttgaccacgccgcgttcgagcacgacctccgtatcgtccgtatccttatacatcttgacgttgaacgaagtgccgacgaccttgaccaccaccgtattggtcttcacgaaaaacagatgatccctgtcggaagccacgtcgaaaaaggcctctccgtcgagtttcaccgtgcggtcgtgcggactgaacgtcttgccgtagctcagggtcgatccctgcgccagccagacctgcgttccgtccagcagccggagggattcgggtttgcggccggtattggtgaacgtatagtacgattccatggccgccttgtgcatgtcgtggccgacgaggtagccgcccacgacgagcgccacgcccagcatggcggcggcgctccaacccgcccagcgtatgatccgcgcacgcttggagcggtgcggcgacgcatccgcgtcgatgcgggcgtgcagcgccttgagcgatttgaggatccgctgcggatcgttctcgacggaattccggtcgcgcacgctccacaaagcccggatttcgcaaaactcggctttgttggcttcggactcggaaatccagctcagaacgtcctgttcttcggccggagtcgcgtttccctccaaatacttataaataagttcgtttttcaaaataatattggtttaagattagacttcggttatacatgcgctccggccttggtcgctccgtataacggcagtcagcatcttgctctctaccaataatacaaagctgggcaacccaccccctaatccgaatgcgaaaaaattttgcagaaaaagacccgatccggcttacgcccgaccggaagtcagagcagtttgtcgcgcagattcttcagcgccagatacatatgattctcgaccgtgctgaccgtcagccccagccgctcgccgatctccttgttcgacatgttctcgaaaaagcgcatgcggaaaatctcccgccgcttgtcgggcagctcgtccaccgcctgccgcagctgctgccgcatgtcgttgtcatagattttggcaaggatcggattcttgtccggatcgtaataatcgaacaccatccggtcgatctgcgaaccgtaccacgagcggtactccgtgtcgcgcttgtgcttccagatgtagttgatcgcccggttgtagacagccttcagcaggtacttgtacaacggatcgtccgtggaaatccggtggcggtttttccagatattgaaaaacacgtcctgcaccacgtcttcggcccactgatcccggagaaacatccgggcatacgacagcatggccggataatacgccagatacagctcgtcgaaagagtctgcattcatcaattgtttgtctaaatcgctcatcgcctgtttttgattttcgcggaaagattcttatcccctgaaatattcatcgattttattcggattttccggatgcgagacagcggtcgggatatatttccacgatcgcaaaaatagaaaattatatttaaaagcaagccctctcccggccgcggagaaaccgctgccgcaaaaaccgcccgcgagacacgaccgataaaacactcagggcaaagcatttaccccaatcctccgaattcatccgccgtacgggtttttagcgatttattcatggaaccgcaacagccggaaagctccccgcgccgatcgtcgccgcctttccgcatccggactgcactccgtacgccatgaaaaaagggtcgcgcggcgcaaggccgcacaaccccgtacaccgggcgtcacggataccggaaaccggccgccggaatgcagattaccgtcccgtcacgcgcatatacttggcaagcgccgtgcggtaggaggcgcaggccgaagtgaggttgttgcggctctgcgtgtaaagcgtctcggcgtcgagcaggtcggtgagcggcgcggttcccgccttgtaaaagttccggttctgacgcagattctcggccgaggactccaccgaacgccgcatgagcaggatctgcgcataggactcctgcacttcgctccacgtccgttcgatctccacggcaagcatctcccgcgcctgcagtcggtcgttttcggcctgctgctccctgatgcgggcctttttcagcgcatgggcgccgccccaccactccgaaacaggcaccgaaacctgcgcgaagaccattccgtcgtccacactcttgtccgtcacattgtagtagagataccccgcgcctatgcctaccgtcggcaggcgtttgccgcgctccatgcgtttctcatacttccgggcttcgacgttcttctccgcaagcaggtattcggccctgcggtcgagcgcctcctcgaccggaacatagtaggcggcgggagcctccggttcgccgaacgcggcattcgccacgtcgaatccgcgctgatcgacgccgatatgctgggccagcagcattttcgacaccttcagtccgttttcgaccttcaggcggttcgacgcgatctcctgctgccgcagctccacgcgcagcaggtcgttgttggtcaccagcccggccttcaccgagagttcgacctgacggcgtatctcggccagctgccgctccacggcatcgagggtcgaaaggttgtcgcggagcgacacgacctgccagaaacaggcatcggtccgctcgcgcacctcggcttcggtctgctgcagctgcaaccgtccgacctcctcgcccagccgggcgagcttgttgccggtgacgatcttcagtccggtgaacaggggctgaacggccgtgacggagccgacgatgccgcgcttgaccagcgaaacgggcagcgtccccatctgcggaacggcgaaatcggcctgcaccagtccgtgctgcgcctgaaagaggccgcccgacgcggaaatctgcggaaagtaattggtgaacgcttcgcggcgcgtctgcgacgcggcgtcgaggtccagcctgctgttgcggagcgtgcggttgtgttcgacggcggcggcgcggcactcttcgagcgaaagcgtctgagccgccgcaggagccgccgcaacgcacaagaacagaaatactacggcttttttcatcacttgtagattttggaatagagcaccggaagtatcgtaacgacgaggatcagcgaaccgatgcctccggcaaagatcgtaatgcccacgggcgcccagaaggtgcttccgcccagcatcatcggcacgacgcccacggcggtggtggcggtggtgaggaagatcggcaccatacgccgcttgccggcgtcgtaggccgccagacgccccgaccaatggcataccttgcgtttgtcttcggcatgctggtacatcagaatcacgttgcggacgatcatgcccagcagggtgatgaagcccagcaccgaggtcagtccgatggtgaagtcggcgatccgcagccccaccaccgccccgaacagacagagcgacatcgaagccatgaccaccagcgtaatgccgaacttgcggaagttgaccagaatgaagaagaagatgatgaccagcgaaatggtcagtcccgacgcgatcgggggaatcgtctcccagtcgaattcgtaggctccgcccagctcggtcgcaatgccggccggaagcgtcagctccttgtcgatcagctcgcttatgcgcgaattgacacgcatggcgttggcgccgcgtttgaggtcggcggtgaccgtcaggcagcgcatgccgttgcggtgcacgattttgctctcgctccacgccggcccgacgtcggcgatctgccgcaggggtacgctgacgccgggcacgggcgaagagacataggtgtccccgacatcggagagcgagcgttcgccccggcgcacgtcgtttttgagtacgacgggcagtttgtaatcgccctcccagacggcccctacgggcacgtctccggcggcgagggccagattgacggccgccagcgtccgggtgacgcccagctgcggcgcagtgacggggtcgagccgcacatcaacgaccgcacggggatcctcataatcggagtgcacccacatcagttcgggcatccgccgcatgcggtccatcagccggtcgcccgcggcgcgcagcgagtcgatgtcgctgccgtagaagcggaattcgagcgacggcacgttctggtagtcgagctgtttgaatttgacgtaggcttcggggaaacggtcggcccatgcgtcggcatataggtcgaggatatcctcggtatcgtcgatcgaggtggtattgacgatgaactgggcatagttcttacccgcgatctgcggagcatagctcatctggaaacgcggcgacgaacagcccacgaacgaagtgacggacttcacccgcccgtcggcccgcagcatccggtagaccgaatcggcgacggctccggtccgttccagcggggtgtcgggccgcaggtaaatctccacggcgaactggtcgcggtcggcgaagggcaccatgcggagtttcagctgcgtggccagcaccagcgaaacggccaccgaggcaaggcccagcgaaatcgtcagccacccgtgacggaaagtccacgccagcacccgccggtaaacgtcgtggacacggtcggtaacgctcttacgcccctccttgcggggctgaaccgccggaatgatcacgatttcgaggaacggaatcaccagcacggccagcagcagcgaaaccatcaggttgatggtgatcgtccacgggaaataggtcaggaagtcgcgcatcatgcccgtcatggtgaacagaatcgggtagaaaatcatgcagatgcagatcgtcgccagcagtagcgacgggaaaaactcccttgcgctctcgacggccgcataccagcgcgagtggccgcgcccgatgtagtcgaggtagccgtcgatcaccacgatcgaattatcgacgatcatgcccagcacgacgaccagcgccgcaagggtcaccgtattgagcggaatgccgcacaaatacatgacgcccaccgagatgaaggtggagagcggaatcgtgacggccgccacgacggccgaccgcagcgggaagagcagcatcatgaccagaatgatgatggccatggccacgaacaggtcgcgcaggaacgaatgcacggagtcgccgacgaccttggcctgatcggcgatgcgctgcacagcgacgtcggacggaagctcctcctccatgaaagcgtgcagcacctcgtctacttcgcggccgtactccacgatattgtatcccccgcgcatctccatcgagaggagcacgcagcggtggccgttgttgcggatatagctgtccggatcgtcgtattcgcgcacgacgcgcgccacgtccttcacacgcaggacgtggccttcggggtcgctccagacgatctgctccgcgacctcgcgctccccggccagcgacggcgcgatatggatcggcgtttcggtctcgccgttgctcaccgagccgcccgccggggtcagcccctgcgaagccagcgccgcggagagcaccttctcgccgatgccgtaggccgccagccggtcgtgatcggcatataccgaaatctgctcctgctgaacgccgtaaggccgcaggttcgagaccgactcgatgcggcgcagacggtcgctcaggtcgtccatgtaccctttcagctcgcggtacgaccgcgtgtccgattcgagggtgatcagcagggccgaggtgtcgccgaagtcgtcgttcgtcacgagcgccgcaacgcccgcgggaagctgcatcttgaacgccgcaaggccgtgcttgatcttcgaccacacttcgtccttgtcgttcacgtcgtcgttcagctcgaccatcacgtaacacatgccgttctgcgaggtggaggtggtcttcgaacgcttcacctccttgtaggtcatcaggaactgttcgagcggcttggccagctgttcttcgacctcttcgctcgtggcgcccggatagacgcccaccacgacgccctgacggatcgtatattcgggaaactcctgcttggggatgtgaaccagtccgtagatgccgaaaacgaacaggcagcccacgagcaggaaggtgatgcggaagttgcgcatcgaccacgatatgatattgacagagcgtcccatcaccacacgactttactgccttcgccgatcttctgcatgccgtccaccacgatccggtcgccgctccggacgccgtcctccagcacgacggcgttgttcaccagacggcccgtcgtcacggccgtacgcacggccgagtcgccgcgcacggtccatacgaaacggcttccgtcgcccgcctgctgtacggcgcgcaccggaagcgcgatctgctcggcggcacccgcaggcgaaacctccacgcggcagaccatgcccggcagcagctcgcccccggcgttggccagtgcggcccgcacgtcgtaggtgtgcgccgcaggattcgccacggcgcccttttcgaccttcccggcctgaaacgtgcggtctccgagcgccggaacggttatccgcatgcgactgtcggcgccgatcgcggcgatctcctgttcgggaacggagaagcgcaccttgacggttccgatttgcagcagcttcatcaccggaacgcccggcagcaccgtctcgccggccgaagcccgccgctcgccgaccacaccgtcgaacggagcgtacagcgcgcagtcgctcaggttcttcttggcgatttcgaaaagcgactcggcctgacggagccgggtctgcgcttcgacccatttgatttcgggcagactttgggcctcgtacagctggcggagacgcccgcaggcgtcttcggcctgctccagcgacgcccgcgcggcgtcgaaggtctgccgggccgaagtagaatcgagttcggccagcagctgccctttccgcacgcgctgtccttcgtcggccagcgtgcgggcgacggtcccggcgacgggaaaactcagggatgccgaagcctcctcctcgaccgaacctacgtacacggccgcgccgaagccggccgacggcgcggcgacgatcgtcgtcacccgcagcggatcggccgtccgggtgtttttcggagaagaacagcccgccgcaatgagcagcaaggcccagaaaatcgttcgtttcattggtttacagtttttcgatgcaaagttccccttttgcggagcggcagaaaaggccgccgtgtcggctaaactcgtcgattcgttcgattttgaacctttcggcgaatatcaaccggcaaattgttatatttgtacgaaaaatccacgacaaaatgaacgaaaaggatatccagagcttttcgctcgccacgctgatcgacgtctgcggccgccgtcccggagacatctgctacgacggctgtctgatcgcgtcgcgcgtcaacgtgcaggacgaaatcgacatcgacctgttccgctatccgacgcgcatcgacgccttcgtcatcctgttctgttccaaaggttcgggaaccttcacctcgaacctgacgcggcatacgctcacggagaattcgatcttcgtacacctgccggggtcgatcatccaagccgaatcgaccgaggagatcgcgctgcacgccgtgatctgcgaagaggagttcatcaggcgcatcaacatagacatcaggctgctctcgcagctgttcctgcacgtggagaagcagccctgtctcaaactcgacgaaaaggagtggacgggaatcacccggtcgttcgaggaactcggcgccgagggtacggagatgccggcggacgtctattccgccgaggtcatacgttcgatcatccggacgctggcctacaaggtgtgccgcgtcatcggacgtcacatcgaaacgagcggagagcggcagatctcggcgcgcagccgcaacgacgagtatttcagccagttcatgaatattctgggcaaacactacacgcaggagcgatcggtgggcttctatgccggacagctgaacctgacgcccaaatacctgacgacgctcatccgcaagaccagcggccggacggccgtcgagtggatcgacgactacgtcgtgctcgaagccaagaacctgctgaaatactccacgatgagcattcaggagatcgcctattacctgaatttttccaaccagtcgttcttcggcaaatacttcaagagccatacgggcatgacgccttcggcctaccggatcggcaggtagccgccggtcgggcatgccgccccttatccccgcgtccgatactgattcggcgtgcagccggcatgccgtctgaagaagcggacgaaatgctgcggatactggaatcccagttcgccggccacctgcccgatcgtcttgtccgggtcgagcaggctctctttcgccgcgtcgatcatcttcagttggatatactcctgcgccgattttccggtctcctttttgaccagatcgccgaaatagttgggcgaaaggcatatcttgtcggcgaaatagcgcaccgacggcagtccctccctcgcggcgacgccctccgagaggtaatcgtccagcagtcgttcgaaacgggccagcgcatcgaggttcaggtcttcgcgcgtgacgaactggcgttcgtaaaaacgcatgcaatagtccagcagcagctcgatattggtggcgataagccccttcgaatgcttgtcgatggcgtgccgcaactccatttcgatctttttcagacagtcgagcacgatcgtccgctcctcttccgacaggtgcagggcttcgttggcttcgtaagagaaaaaggtgtatttcctgattttccgtccgagcgacgtgccgcggatgaagtcgggatgaaacagcagtccgacggacttcgtgggaatcccttcgatatcggtatagccgacggtctgtcccggagcgatgctgaccacggtctggtcgtcgaaatcataccccgtcttcccgtagttgattcggcagccccgcgtctccttgaggaaaaccgaatagaatcccatcgtcatccggtagtttccctgactttcggccgtgtcgaaccggaccacgcccaccagcgggtggcgggtctcgaatccgaagagtttgttgtagcggtcgatcgtatcgatcttcagaatttcgtccatacagctcggtttttccatacgcaaagatagcgctttttcccgtacgcggtgcgggcgtcggtgcgaaacagtaatcggggtaactttatccgtaatcggggtagccggctgtcagacagcagattcgcttcagcttcaaaaaccgtaatccgggtaatttcatccgtaatccggataccggcccgaagcgtttcggcaagtaattttgcaacgtggaaatcaccgataaaaaaatatgaaacggattctaattttaacgacaacacttattatgatgcacaacatctcctccgcacaaacggatgcggacaatttctaccgaagcgatgcggtaaccgcagaaaaggtatccttcccgaaccagtacaaaatgaaggtcggcgccaacctcttccggcccaaggagatgaaaccgggcgaaaaacgtcccgcaatcatcgtcggccacccgatgggagccgtcaaggagcaggctgcgaacctctatgcgatcaaaatggccgaacgcggattcgtcacgctcgccatcgacctgtcattctggggcgacagcgagggagagccgcgcaacacggtctccccggagatatacgccgaggatttcagcgcggcggcggatttcctcggaacgcgggagttcgtcgagcgcagcggcatcggcgcaatcggaatctgcggcagcggaagtttcgccgtaagcgcggcgaagatcgatccccggctgaaagccgtcgccacggtgagcatgtacgacatgggcgcagccagccgcagcggactgaaaaacgcccagacacttgagcagcggaagcggatactggccgaagcggcggaacagcgctacgcggagtttacgggcggggaaaccgcatacaccggcggcacggcagacgagctgacggaaaactccaccccggtcgagcgggaattctacgccttctaccgcacgccgcgcggagagttcacgcccgaaggggcgacgcaccggacgaccacgcaccccacgctcgcaagcaacgtgaagttcatgaacttctaccccttcaacgacatcgagaccatctcgccgcgtccgctgctcttcatcgtcggggaaaacgcccattcgcgcgaattcagcgaggacgccttcagacgggccgccgagccgaaagagctgtatgtcgtaccgggcgcggggcacgtcgatctctacgaccgcacggggctgatcccgttcgacaagctggaagagttcttcggaaacagcctgaaataagacggaacgaccatgaaaaaacggctcgcatacagtccgggaagactggttgcaatcctgaccttcggcgtcttcggcatcatcaacaccgaaatgggcgtcgtcgggattatcccgcagatcgccgaaactttcggggtgacggttccgcaggcggggtggacggtgggcgtcttcgcgcttatcgtcgccgtctcggccccggtgatgccgctgttgttttcaggcaccgaccgccggaccggctccgtagtcttcgcctacgacctcaatccgcgctacggggagcagctgccctccgtacggctgaccggactggcccccgatctgcgctaccgcatccgcgaaataaacctcatgccggggcagaatccgcgtatcgagcacaacgaccgcgtcgtaagcggcgattacctgatgaaggcaggtttgaaactcttctcgacggaccgcgcccgcagcgtcgtcgtcgagctgaaagccgaatgacgggaagcggaaacgaagaaccgaaaaacagaggagactccggatgcgaatgcacatccggagttttcatttgcccctccccaacagattaatgtcgtaacggttaccacgcaagttggaggtttgcttcaggattttcacctttgccgccataaaaccctaacgaacctgatatgaccataaaaacctgcaaattccgcatcggcgacgtctatttgttccatacgacagatcccggctgcgacagccgaacgtcgctatggggaatcgtcggcaatcgggacgccgagaaccgcatctgtctggaaacctcctcggcgaatctgagaaagtatgattattggaccgttctgcccgccgaataccaattttgcaggctctccacgcgagaggaattgagggacttctcttttaacctgaaccgcaattaattgcgtaaattttagtgagcaatatcgctcaaaaactaaaattttttattttataagttacaataattcatatatgcgcctgagagtcaaggcggttcaggaatttgaccaaatgtattatgaacccgaatacaaggcgaaatgccacaaacgggtttggaaacggctcggacgttacatcttcggcatttcttatcagagttatctggattatctgaagatggacgtttcggacattccgcccacgccgttcgaggcccggcaagcccaacgcaagctggtggacaaactgctggagcgcgaacttgagcggatgaaacaccccgtccggcgggaaaaaccggaggagtggaaaaaagaacctgtagaacaggggtgacgccaactttttcagcggcgggacgggctttcgggtccgtcccgttttttcggtccgcagcgtttcagcttaccggcctcccggcctcctcctccccgtcctgcatttcagtcatcctgtccaatacccctgctatgcgctcccccccaaggacgccatcacccgctcgtcgtaataggtggacaaatccacgttcggcagcacgtccgacatagccatcgccatcagtttggaacttaataccgtcaggtagataagcgggatatacgggggcctgcttatcccgtcggtccgcatcgtgatccgctgctgcggagccaccagacgccccggtttctggccttttttctcgatgttccacagcacgttctcttcggcctgcgtgacatagagattgaacgtcgtgtcgttgacatattccgcccggtcgacccaaaaatcgacgccgtaatcttcggccgtgggatcggcgcagatgccgcagtcgggcatgtcgcacataatggcccgcaggatgatgtttttgtcggccagctccgccgactgcattctattcaacgccgcaatgcagatattgacctgcgtcgcgtaaaagcggtcgatggcccgcagggcttgttcggaatcgggatcgtgctggttcatcgtggaatttttgcgttgttcatcaatgcacgtgccgttttacggccggaacaccggtttgaaaaaaggggcggctccgaccgaacaagtgacgcaacttcactttaggaagaattcaatgcggagaccgccccggctaccagatttcagggaccgcttccggcgcaatgcctgccggctgcatccggaatgcgggattgtatgtgtcgctcagagaaccttatgacgcccgccgcgatcgtgcggcgtgagggcgttcccccgctccccggcccaaaaacggacgtcctgccgcgcagaaccttgcggcaggaacgtccggcccgtattgtgccagagcagtaaaatataatggggattttgggccttcgggtaattccggaatcggatgcggcgggacattttcttcggttttcgttggtgtgaatccgcgtcccgcaagggcataaaaaagggggcgcggtgtcagcccctaacgacaggtcataggaaacccgaatcagaaagctgtcctgcgccccagccacgccctgcccaaatatgagcaggacataactgggactgacaactattatacctgattcaaaccctcccgaaagaggttcctatgtttgtcgttaggtataaagagttgtttaccctttatagttatgtccgtcggctatgccgagctatacgactgcaaagataacataatttcctttgtttagaattggtctgctttgtgtatttactcagttcgctacaaatatataacaatctttcgacaatgacaaatacatgaaataagaatatgtcattattcgggtcctttgttttatgaaaaaacaaaggcgtaacgacatattgcttgccattatcggtgaaaagctggtaaagttacgcgaagcaagaggactgtctcaacagaaagtttatatccatacgggaatagatatggatatgattgagcgtggtgaatataaccttacattgaccactctttcagatctttgtgattattacaacatttctataaaagaatttttcaagggagtagaaaatccttgaccccctaaatatggtatggatagtcagcggcataacgaaacattaatgaaagcagtcgcaaagagatttagtgaactgcgaaaagctaaggggttgtcacaaatagaaatttatcgtgacatcgggatacatatcggtcgtatagagtcaggttattcaaatattacaatgggaactttttccgatctttgtaaatattataatatttcatttgaagaatttttcgattcattggatgttgaatgaccaaaaatccctataagatgatgcagagccgtttataactccaatgcccagcttgttttattctattaccgtcgttcagtttgccgcggcgaacacctcgcccgtcttccgtattttccgaaaaaaagaaaagtggttgataatcgactgattatcaaccacttaccgagagcggaaaacgggactcggacccgcgacctcaaccttggcaaggttgcgctctaccaactgagctatttccgcaattatcgttttcggacgggcgggacaactgcatccgcacctcggctccgggcttcgaaacctgcgtttcgggactgcaaatataaaccgaaaaatttattctgcaaaattttccggcgaattttgtcgcaaaattactcttgcgccgcccgaaacgcaaaaaaagaaacgccggtgcagatgcgatcgcgcaggcatgcccggcgccaacgccccgcagcgaacggcaacaaaaataaggctgccggaaatggcagccttatctatatacggatcgccctcagagcgaatcccgattagcggaccttgaagccttcgtcggcgcgaaccggaatcggcatctgggcataaatgccgccttcgagcttgtcgcgcaccgacttgaacgccgcgatcgtatagttcacgtcgtcgagcgtatgggctgcggtggggatcacgcgcaggatgatctcgcccttcgggatcaccggatagattacgatcgagcagaaaataccgtggttctcgcgcagatcgacgatcaggttcgtcgcttcggggataccgcccttcataaagacgggggttacgggcgagttggtcacgccgatctcgaatccgttttccttcaggccgttctggagcgcgcggacgatctcccacagcttctgctgatattcgggatggttgcggatcagctccagacgcttcagcgcgcccatgaccatcggcatcgggagcgacttggcgtagagctgcgaacgcatgttgtaacgcagcaggttcaccagccagcggggaccgcagacgaatgcgccgataccggccatcgacttggcgaaagtgttgaacagcacgtccacgccgtcggtcacgccgaaatgcgaagccgtaccgcggccgccctcgcccatcgtaccgaagccgtgcgcgtcgtccaccagcagacggaactggaaatccttcttcagcgccacgatctcgtcgagtttgcccagatcgcccttcatgccgaagacaccttcggtaatcacgagcacgccgcccttctgctcctcggcgaggtccgtggcatgctgcagctggagacgcagcgaatccatgtcgttgtgtccgtacacgaaacgcttgcccttgtgcagacgcagaccgtcgataatgcaggcatgcgcctcggcgtcgtagacaaccacgtcgcgcggcgtcagcaggcagtcgataatcgagatcatgccctgataaccgaagttgagcaggaaagcgtcctccttgccgacgaactcggccagctcgcgttcgagctgttcgtgataaacggtctgaccgctcatcatacgggcgcccatcggggccgccataccgaatttggctgcgccttcggcgtcggccttgcgcacctcaggatggtttgccagaccgaggtagttgttcagactccagttgagcatctttttgccccggaaaaccatgtggggaccgatctcgccctccagtttggggaacgcgaaatatccgtgggcgtacgacatgtactgaccgataggtccgcctgcatttttttcaaggcgtgcaaaaatatcaaccataatgtatataatttaatgttagtttccgttccggacgcgcaaaagtacaaaaaaacctttttagccatcaaaattagccgttttttattcggcacgggtacgcatttatacttatttacacaggtataaaaagaaaaaaggccgctttcggcggccccggaacggttttcagcgccgccggtcgatcgcatcgacgatcaccgccacggcgccgtcgcccgtgacgttggtcgccgtgccgaaactgtccatggcgatataggtggcgatcatcagtccggcgagcgtttcgtcgaatcccagcatcgactccagcagtcccagcgcggccatgatcgccccgcccggcacccccggagccgcgatcatcgtcacggccagcagcaggatgaatcccacgaacgttccggccggcagctccagtccggcgatcatcgacacggccagcgcgcaggcgacgatcttcatcatcgaaccggagaggtggatcgtcgcgcagagcggcacgacgaacgacgcgatttcgggccgcacgccgagtttcagggtctgcgccagcgtcacggggatcgtggcggccgaagactgcgttccgagcgccgtgacgtaagccgcaagcatcgtgcggagcatccgtagcggatttttgcgcgccgcgagtccggcgacggagaactgcacgagcagcagcacgacggtcatgcagaagatcaccgcgatcagcttcacgaagacgcccagcacgcccgcgacctgccccgaccgggtcatcgagaggaaaatgccgaagatatagaacggcagcaacggaatgatgacgctgccgatcacgcgttcgataatccccttgaattcgtccatcacccccttgaacttcacgctatgggtataggccatgcccagtccgagcacgaaggccagcaccagcgccgacatgacgccgaacagcggcggcatctgaaccgtgaaatagggcgtaagcgccgcgcccgcatcgtcgggcagcacggcctgcgagccttcgagcagcgcgggaaagaccgcccgccccaccaaataggttccgaagcccgaaaaaagcgtgaaggcataggccagcgccgccgtgacggccagcagccacccggcgttcttccccagatcggcgatgcccggcgccaccagaccgaggatcagcagcggaatgacgaacgagaggaactgtccgaaaatatcgttgaacgtcagcgcgatgcgcgtcgcccattcgggaaagaaaaagccgcatcccacgcccagcccgatggccagtacgacgcgcggcagcagtccgaacctgaatttcataggagaatgatttttgtaaagataggaaaattacttagctttttcaattcatatgcatcattaacaaataattcgtatctttgtgttgtcttcatagacagacatattttgatgaaagtgttttgcttttattcttgttaggaaatctggtaaatttcatagagtcaagaaaaacaataacactcattcacttgcaatcgtatgcgaaacaatattccatactcgcaggtgtggagtattgtttatttgactcaaggtttaccagaacctcctaacagataggcaatagactccacacttctttttttaacaaatgatcgtaaaggagtcagcggtctcgcaaaaaaacaatcttatgaataaaatcctcttattccttttgggtggctgtataattgggagtgccatcactattttttctgcacaaaacaaacaaaaaaaaataccaacacaacaaaacgcagagtcaaaacaaaacactcaacaagaagatagaatatctacaatttcaccaaatattcttctcggatttcatcttggaatgtctaaattagaatataattcacttatcaaacaatataagaacagtggcaaaatgtcgatatgggataacaacacatattgcatgcattggtttgaaacccagaacataaccgttcatgataattcagttggcaattttactagcacacaatcgttttccataatctttgatattcaacccaaatttgtcaataataaattacatactttatcgatgttaatcgaaccattatatgatgatacaatattagttcaaacatcaaatattattctactcaaaaatcatatatctaaaatattaggttcgcaaccacccctaaattcatttcactggacattttcaacatatacagtcaatttatctcaagaaaaaatcaaaagcaagtattacgaaaaacattatacatattatcgactaactataacaaaatagattttttaattatggcactaatcaattgtccagaatgtgggaatagcatttcagatcaggcatctcactgccccaaatgcggatatcaaattagtaatcacagcttctttcccaaaacagaaggttgctttttacaatcaatgaatatgggatgcctaatattagttattatattcctttttagcataatcctttcggaatatgacataccagaagaagacctcccaataataggtataattacgattattgtatttggaataatgatatgttacaattttttcaaaaagaaaaaacaaaatcaatgataatttttaaaaatgccataaatttataattccgaacgattttgtatttttgcattatgacatcactatttcacgacatcattttcggcccggtgcactcacggcggctgggcctttcgctgggggtgaacctcctgccgaccgattcgaaactctgctcgttcgactgcatctactgcgaatgcggctggaacgccgaacaccccggcggacggcgattcaacgcccgcgaagatgtccgcacgcagctcgaagcgacgctgcgccgcatggtggcggacggcacgccgcccgacgtcatcaccttcgccggcaacggcgagccgaccctgcatcccgaattcgaagcggtgatcggcgatacgatcgccctgcgcgacgcattgtgcccgtcggccaaagtctcggtgctctcgaacgccacccagctccaccgcgaagaggtgcgccgcgccctgctgcgggtggacaacaacatcctcaagctcgactcggcgttcgacgctacggcgcgtctgatgaacaacccccaaagccccgcctacaccgtccgcggcgtcgtggagcagatgaagggcttcgacggacgcctgaccgtgcagaccatgttcctgcgcggcgaatgcgacggacagaaaacagacaacacgaccgaagaggaggtctcggcgtggctgcggctgatcgaagagatccggccgcggcaggtcatggtctactcgctcgaccgcgacaccccgtgccggacgctcgaaaaggttccgcgcgaggagctgcaggccatcgccgcccgcgtcgaagcgctcggcatcccctgttcggtagcataacccgcctgacgatgagactgctcctgttatcgctgttgctcgttgccggttgtacggcgaccgcccagcgccgtcccacggcgcgcgaactgggcgaactgcaggacagcgtgtggcgccgtctcgacatcctgcgcacgaccgaccggggattcgccgcctgcacaccggagcgcgaagcattcgacggaatcgcgaacgccgcccgcacatctgcgcccaaggaaatcgcaagcgtcgccgacgccgtccggtcgtccgggaccgacgaaaccgaggggatcgtccgcgtccgtctgctccgggccgactcggcgatgaaagcccgcttccgccgttacgtgcacgacagccccctgatccggctcgaagggttcgatcccgacacgacgccctatccgcccgcccccgaaggcacgccgccgcccgacggactgagcatggacgccgaatacgccttctaccctgcggagaccgactgcgtacggcttacgatccgctaccgaggcgattcgaccgtctatttcgggacggactacaccgtttgcaggttccaaaacggccggtgggaaacactgccgggcgccgacgcatggaactccctgctgatcggcatcggccgcccgcaatttcccgtccccggcgacgcccggcagacgaaagagtacgcctacggcttcacggcccggctcgcgccgcgcgtctatccgtccgtatacgcccgttaccgcatctgcaaaaacgtttacatggaaaatccgcaccgcaactacctgctcaccgccgattttacggtgacgcccttcgtcccgttcacccgctttccggagcagacgggcgacaacaactgacaaatcatgcaaatactcctctcctgcgccaaaacgatggccgaaagcacctccctgccgataccccgcaccacttcgcccctttacggcgcgcaggccggggagttggccggacagctggcgacgctctccaccgaagagctggcgaaaatcctgcgcgtaaaccatcggatcgccgcgacgaaccggctccgctacagccgcttccacgacgatgcggagagggcgctgccggcgctggcggcctacacgggcatcgtgttcaaacggatcgctccggcggatttcacggccggggatttcgaatatgcgcaggcgcacctcaacatcacctcgttcctttacggactgctccgcccgctggacgcgatccgcacctaccggctcgaaggcgacgccgtactgcccggccacggcgagcagacggttttcgaatattggcaggacaaactgacggacgcctttctggagaagatcaaggccgacgacggcatactggtcaatctggccagcagtgagatgaagcggctgttcgactggaagcgcatctgccgcgaagtgcgggtcgtcacccccgaattccgcatccgcgaagacgaccggctgaaaaccgtcgtggtctatacgaaaatgtgccgcggcgaaatgacccgtcatatcctcaaaaaccgcatcggcgatccgcagcagctgaaagcgttcgagtgggagggtttccggctgaatccgacgctcagcaaagccgacgactgggtgtttacgatgtaaggagtccggatattattcggcgcagaccggcgcctgtttcgtttcgagcagggctttcagaataccctcctcgtcatagccgcagagggcatagagctgagccggagttccgtgttcgacccactcgtcgccgatgcccagcgaacgcaccgaaacgtccagcccgcgtgcattgaaaaatgccgcgacggcttcgccgacgcctccgcgcagggcgccgtcctcgaccgtcaccacgcggcggaacttcgcacccacttcgaggagcagttcctcgtcgagaggtttggcgaagcgcaggtcgtaatgggctgcgctcaccccttcttcggcggcgcgtgcggcggcgcgtgcggcggcgttgccgaccgtcccgacggtcaccagcgccacatccgctccgtcgcggagcttgcgtccccggcccacgggcagggtttcgaaccgcgcaccgcgccacatccggccttcgccgcagccgcggggatagcggatcatgaagggatggccgtactgcagtcccgtatacatcatgccgcgcagttccagctcgtccatcggcgcggcgatcgccagtgtcggcacgcagccgaaggccgccatgtcgaagactccgtgatgcgtcacgccgtcctcgccgaccagaccgccccggtcgagacacatcaccaccggaaggtcctgaatggcgacgtcgtggatcacattgtcgtaagcccgctgcatgaaggtcgaatagatattgcagaagggcaccatgcccgcggcggcgagtcccgccgagaaagtcacggcatgcccctcggcgatgcccacgtcgaaacagcgcgacggcatggcctgcatcagcagattcatcgagcagcccgacggcatggcgggcgtgacgcccacgacgcggctgtcgcgttcggcaagttcgacgagcgtctcgccgaacacgtcctgatagcgcgacgccgaacccggcgacgaaatccgctcgcccgtatcgggattgaaccgccccggcgcatgccagacgggctggttgtgctcggcgggcaggtagcccttgccctttacggtcatgacgtgcagcagtttgggtccttcgatatcgcgcagcgcgcgaagcgtccgcaccaattccttgaggttgtggccgtccacgggtccgaaatagcggaaattgagactttcgaacagattgctcttgttgagcagcccctgcttgacggcgttgcccgccttctggcagagacgcagcaggcgcggcgtatgcgaaaggatgccccacaaccgttgcttgaagcggttgtagtggaccgaagtcgaaatcttgagcaggtagtttttcagcgcgcccgtggcctgatcgatcgccatgttgttgtcgttcagaatcaccagcaggttggtgcgcttgctggccccggcgttgttcagcccttcgaaggccagcccgccggtcatcgaaccgtcgccgatgaccgccacgacccgatacttctcgccccgcagttcggccgccttggccatgccgaaggccgccgagatcgacaccgaggcgtgtcccccgccgaaagcgtcgtattcgctctcggacatgcgcgggaagccgctgatgccccccagccggcgcttggttttgaacgcttcgcggcggcccgtgatgatcttgtgggcataggtctggtgccccacgtcccacacgatcttatcggcgggcgtgtcgaagacataatgcagggcggcggccagctccacagcccccagactcgacgcgaggtgtccgggatttaccgaacattcgtcgacgatatagcgtcgcaactcgtcgcagtaagcgcgcaactcctccgcggagagccttttgaggtcctccggcgaatcgatatgtagaagcagtctgtattcttccggcgtcatggcgagacaaagataatgcaagcagggcacaaaagcaagcccgtccgccttttggccggacgcagcctttccggaacggcgtcgaaaagcgtgcgcaccggacaccgcgccgaatttgttcggacacggtccggagggcgtctattttctgtaaagatagtcattgatgccggtttttttcgaaaaaatttctatcttcgcgttacggtaaatccattgcaacatgaaatacaagagaatactcctcaaactgagcggcgaatcgctgcaaggttcgcagaaatacggactctcgcccgaagtgctccagtcctacgccgaacagatcaaggcggccgccggaacgggcgtccagatcggcatcgtcatcggcggcggcaacatcttccgcggactcaccggcgccaagaagggcttcgaccgcgtgaagggcgaccagatgggcatgctggccacgatcatcaactcgctggcgctgcagtcggcactggaggacaacggcgtgaaggccaaggtactgacttcgatccgcatggaacccatcggcgaatactactccaaggcccgtgccatcgagtacctcgaagcgggctatgtggtgattatcggcggcggcacgtcgaatccctatttcacgaccgactcggcgtcggcgctgcgcggcatcgagatcgaagccgacgtgatgctcaaaggcacccgcgtggacggcgtttacacggccgaccccgaaaaggacccgacggccgtgaagttcgaccggatcacgttcgaggaggtgctcgaccgcaggctgaaagtcatggacctcacggcgttcaccctttgccgcgagaacggactcggcatcatcgtcttcgacatggacacgccgggcaatctgggcaaagtacttgcaggcgaacagatcggaacgctcgtaaccgggctttcataggagcttccggccggcactccggactccgtgcgacaaagtgcccgacaaaccaaaacaacgaaaaaacatggcgacaaaaaagagtaacagacaattatggatcatgctggcgctgatcgtcgcgatcgtcgccgtcatcctgctgctgccttcatgcggcggcaacagcagcaaaaaggcaggcgacgtcgaatcgacgacgctcgtgaaggccggcgacaaagcccccgacttcacggtcgagatgttcggcggcggcaaaaccgacctcgccgaactgaaaggcaaggtcgtcctgctgaacttctgggccacgtggtgtccgccctgccggcaggagctggcgcgcgtgcagagcgacgtgatcgaccgtttcgcaggccgcgatttcgtattcctgcccatctcgcgcggcgaaacgcaccagaccgtggcggcgttccgcgaaaagaccggctactccttcccgatgggtctcgacccctcgcagaccgtctacgaccgttatgcgtcgaactacattccgcgtaatttcgtcatcgaccgcaacggcaaggtcgtgctggcgtcggtagggtacgaccccgaagagttcgacgaaatgatcaaaaccatcgaaaaaacactcgaataactatggataccaaaacgattctcaacgaagcctccggccgtatgcagaaggctatcgaccacctcgaagaggaacttctgaacgtgcgcgcgggcaaagcctcgcccaacgccctgaacggcatcatggtagattacttcggctcgcaggtgcccgtatcgggcgcggccagcgtcacggttcccgacgccaagacgatcctgatccagccgtgggacaagaacatgctccgcccgctggaaaaagccatcatcgactcgaacatcggcctgaccccctcgaacaacggcgagcagatacgcctgacgattccgcccctgaccgaagagcgccgcaaggagctggtgaagcagatccgcggcgaagccgaaacggcccgcatcagcctgcgcaacgcccgccgcgacgccgtcgaggcattcaagaaggcccagaaggagggcatgcccgaagacgaatcgaaggacggcgaaacccagtcgcagaagctgttggaaaaattctctaagctgctcgacgaagcgctcctgaagaaagagaaggagatcatgaccgtctgaaacggtttcatccgcatgaaaatccggcccgattcgtatattggccggattttttcatatatttgcccctcctaaacattccgtcccgatgaaaaagccattccgcaagatttcggtcctgatcgtattgttttcgctgttcggcatacagaacgcagcatcgcagggctacgtcaaactcaacgcgctctatgcgctggtcggcgtcgtaaacccctctgtggaattcgccatatcccccaaatcgaccctgcagaccgacatcgtggtctcgccgtggaagtcgatcaaccaaaagcatatgaccttcgccatcttcatgggcgaataccgccgctacttcaaggagcacaaccggggctggtatctgggcgccaatatcggcatgatggctttcgacatgtctaaaccctatatcgaaggctggaagctgaaattcgaagaccgctactgcaaaggctacggcatgatgatcggcctgtgcgtgggttacgaacaccagttcggggagcggtggctgctcgacgccttcttcggatgggcatggatggacagccactacaacggatacagtttcgacggcaaggtagacatgtatccccaccgtccggtgcagccggagaaccccgatccgttcaacggctcgtcggagtggtatcccaacaagctcggcgtctcgatcggctaccggattttcatgcccaagcgcctgcgcaccgacagctcctgctgcagatagacggcacggattgcgggagacggccgcaaacgacggacaaccataaacgccctgctcctcaaagagcaggacgtttcgtcttgccggatgtgtccgaacaggttacgggccggcaaaacagccctgcgacactccgaaagaaaacgccggtttcgaaacgtccgactccgcaggttctgcccgttcttccgctaattcgaccgactccgcaagttccactgcctctgcgaggaggggctgcggaatctgcggagctgccggttttgccgactctgtccgttccgccgcacggcatgatccggacggcgcactacatgcgcaaaaaaaacggaagcggggtgaaaataccccgcttccgcgttctgacgatgcgcggcctgcgccgcagtcatcgggaattacttaaccttcgggccggcagctacgagcttcttgccttcctcgttgcccgtgaacttcacgaagttctttacgaagcggtttgcgaggtcctcggccttcacgtcccaatccttggcgttcttgtaggtgtcgcgcggatcgaggatcttgggatccacgccgggcagagccgtcgggatcttgaagtcgaagatgggcagcgtcttggtctcggccttgtcgatcgaaccgtcgaggatggcgtcgatgataccgcgcgtatccttgatcgagatacgtttgccggtgccgttccaacccgtgttcacgaggtaagccttggcgcccgacttctgcatcttcttcaccagctcctcaccgtacttggtggggtgcagcgaaaggaacgctgcgccgaagcaggccgagaaggtcggagtcggctcggtgatgccgcgctcggtacctgccagcttggcggtgaatccggagaggaagtagtacttggtctgctcggcgttcaggatcgaaaccgggggcagcacgccgaatgcgtcggccgagaggaagatcaccttcttggcggccggagccttcgatacgggcttcacgatgttttcgatgtggaagatcgggtacgatacgcgggtattctccgtaaccgacttgtcggagaagtcgatcttgcccttcttgtctaccgtcacgttctccagcagcgcgttgcggcggatggcgttccagatgtcgggctcgttctcctgcgagaggttgataaccttggcgtagcagccgccctcgaagttgaatacgccgtcgtcgtcccagccgtgctcgtcgtcgccgatcagctcgcgcttcgggtcggtcgaaagcgtggtcttgccggttcccgacagaccgaagaagatagccgtctcgcctttggcgttggtgttggccgagcagtgcatcgaagccatgcccttgagcggaagcaggtagttcatgtaggagaacatgcccttcttcatctcgccgccgtaccacgtgttgatgatgacctgcatcttctcggtgaggttgaagacgacggccgtctccgagttcagaccgagtttcttgtagttcttgaccttggccttcgatgcgttgagcacgacgaaatcgggctcgccgtaattctccagttcggcgtcggtcggacggatgaacatgttcttaacgaagtgcgcctgccaagccacctccatgatgaagcggatcttcagacgcgagttctcgttggcgccgcagaaagtatcgacgacgtaaagcttcttgcccgacagctcctgcgaagcgatcttcttcagctctttccaagccgccttggttacgggcttgttgtcgttcttatactcgtcggaagtccaccagatcgtatctttcgtggtctcgtccattacgaagaacttgtctttgggcgaacggccggtgtaaacgccggtcatcacgttcacggcgcccatttcggtctcctgacccttttcgaagccgcggaggcccttcttggtctcctcgcggaagagttcgtcgtacgacggattgtacacgatctcggtcacacccgtgatcccgtactttttcaaatccattttgttcatagcaatcgttatttttaataaaacatcaaatccaagatttaacctaaccgtcgaaatccgcgcatgcggactttaaccgcacaaaggtagaaaaacttttacacttgtgaaaaaattaacagtgaaaaacacaaaaaaagaacattattttttccggcacccgtatatgattcatttataacttcgtatctcctccgcccgaagccgcgcacagctcaggaactgcggacataccgcaaacatgctgccgcgatttccggttgtgccggacgaatccggcagcctccgaaaaacgcggagcgcaccggctttcggcctgtttcggaaaaatcggaaaataatgtgccgccgtctccgtttttttcttaactttggtaaccatggccggactctatttccacatacccttctgcaagcgcgtctgcgcctactgcgacttttacaaaagcgccgacctgcggcgcatggacgacctgctggcggccatgcaccgcgaactggacgaccggcgcggctatccgggcggcgaagcggtgacgacccgctatttcggcggcggaacgccgtcgctctgcacgcccgaagcgatcaggggactgctggaccacgccgcacgactcttcgactgctccggcgccgaagagacgacgctcgaagccaatcccgacgacctgacggccgagtacctcgacgggctgctcgaagcgggcatcgaccgcctttcgatcggcgtacagtcgttcgacgacgactgcctgaagctgatgaaccgccgccacacggccgcgcaggcggccgaagcggtccgcgctgcgcagcgcgccggattcggcaacatcaccctcgatctgatcttcggcgtgccgggtttcggcggcgatacgctgcgccgctcgctcgatacggccctttcgctcggcgtacagcatatttcggcataccatttgaccgtcgaacccgatacggctttcggacggcgcgccgcgcggggcgaattccgggccgtggacgagcagatcagcgaaacggagttcctcacggtccaccacacgctgaccggagcgggattcgaacactacgaagtctcgaatttcgcccttccgggcttccgcgcccgccacaacgcggcgtactggcacggcgcgaagtacctcggcatcggtcctgcggcgcactcgttcgacggcgaggagcggcactggaacgtaggttcggtggagcggtacatcgcgggcgatccggcggaacgcgaactcctcacgaacagggaccgtttcaacgagtacgtcatgacggcgctccgaaccgccgaaggaatcgacacgcgggaggtcgcggcccgtttcggcacgaaacggctggagcggatgcgcgaagaggcggccccctatctgcaaagcggcgcgctccgcgacgcaggcggacggctggcggttcccccggagcggtttctgatctcggacgccgtgatcgaggcccttttcgaaacataacgacgcgcgcaaccaagtgaaactgaaatgttaagttattcttaaatttttttactaactaccctttcgagattgttaatataaatataagtattacctttgcaccggttttcaaccgattcgacaagtaaattacaaacaagcatcacaaatatgagcaatgcaaaactaacccccgattacctgttcgaggtaagttgggaggtctgcaacaaaatcggcggcatccatacggtagtctcgaccaaagcgcaaacggccatccggaaattcaacgagcgctatatcctcatcggacccgacctgcagcacgaaggcgtaaaccccgaattcgaggaggatcccaacctgctgaagacatggcgtcaggggctttacgccgaaggcatccgcatccgcgtgggacactggaaaatcaagggcgaaccgacggcgatactggtggacttcacctcgctgattccccgcaaggacgaaatactcaagaaactctgggaggcctaccacgtcgattcgatttcgggtcagtgggactacatcgagcccgtgctcttcggctacgccgcaggcgcggtgatcgcctcctatgtcgagaacttctgcaccgcgaccgacaagatcgccgcccatttccacgaatggatgaccgcggcgggcggtctctacctgcgccgccatgcgccttatgtggcgacactcttcaccacgcacgccacggtcatgggccgctgcatcgcgggcaaccacctgccgctctacaccgacctgaccaagttcaatgccgacgagctggcacgccagttcaacgtcgtggccaaacactcgatcgagaaggccgccgctgcctaccacgacgcattcgtcacggtcagcgacatcacggccaacgagtgcaaattcctgctgggccgcgagcctgactgcatcacgcccaacggcttcgaaaacgacttcgtctggaccggcgaggagtacgacgcgaagcgcgccgaagcccgcaaaacgatgatctcggtggccgaagcgtgtctgggcgaaaagttcgccgaggagccgctgatcgtcggcaccagcggacgctacgaattccgcaacaagggcatcgacgtattcatcgaatcgctcaagaaactggccgcatcgccccggctcaaacgtcaggtgctggcctatatcaccgtgcccgccgccaaccgcggtccgcgcgcggacctgcaggcgcatctggccgacccgtcgaaacccatcgacggcgggcagtacaaatacacgacccactacctcgaataccagagcagcgacccgatcgttaacgccctcaacggcagcattctgaccacgcccgattcgaaggtgaaggtgatcttcgttccgacctacctcaacaaggccgacggcatcttcggcaaggattactacgaactgctggtcggcatggacatgaccgtattcccctcctactacgaaccgtggggatacacgccgctcgaatcggtggccttctccgtgccgacgatcaccacgacgctggccggattcggtctctgggcggccaaacagcgcgagcatgcgggcgtggagatcgttctgcgcgacgactacaacgatcaggaggtcgaagagaagatcgccgagtcgctgctgcacttcagcctgctggacgacaagcacgtgaacgagatgcgcgtgtcggcctacgaaatctccgaaacggcgctctgggaacacctcttcgccgcctacgagcaggcttactccgaggctgtcgaaagttcggtcatccgcaccaaccgcgccgtgctggacgagggcggaaaccgcaacgagcagatcaacttcgtgcgccagcagcttttcgccgagaagcccaactggaaccgcatgatggtggacaagaccctgcccaaacggctgcacgccctcgaagagctgtcgcgcaacctctggtggtgctggaatcccggcacgcgcgacctgttcgaaagcatcgaccatgcgttgtgggccgagtgcgaacgcaatccgatcgcattcctcgacaaaatgagcgtggagcgcatgaaggagcttgaacaggatacgaatttcctcagccagctcgacgccgtatatgcgcagttccgcgactacatgaacgagaaacccgatccgaaggcgacctcgatctcctacttctcgatggagtacggcctgcattcgtcgctcaagatttactccggcggtctgggcattctggccggcgactacctcaaggaggcgtcggacaagaacgttccgatggcggccgtgggcctgctgtaccgttacggctacttcacgcagcggctctcgtcgcagggcgcgcaggaggcgacctacgaagcgcagaacttctacaagctgccgatctcgcccgtgcgcgacgaagccggcaactggatgacggtcaccatcgccttccccggacgtacgctctgggcacgcgtctggaaatgtcaggtgggacgcacggacctctacctactcgacgcggacttcgaggccaacctcgaagaggaccggcagattacgcaccacctctacggcggcgactgggagaaccggctcaagcaggagatcctgctcggcatcggcggtatccgcgcgctgcgcaagctgggcatcaaacacgacgtattccactgcaacgagggacacgccgcattcatcggcatcgagcgcatccgcgatctggtgacccacaagaagctctccttctcggaggcgctggaggtgatccgctcgtcgtcgctcttcacgacccatacgccggttcccgcaggccacgacgcattccccgaatcgatgatccgccagtacatgtcgcactatcccgacgtgctgggaatcacgtgggaacagtatatcaacctcggcaagaccaaccccaacgaccccaacgagaagttctcgatgtcggtgctggcctgcaacctctcgcaggaggtgaacggcgtgtcgtggctccacggcgaggtgtcgaaggatattctgggcagcatgtggccgggctacttcaaaaacgagcttcatatcgggtacgtcaccaacggcgtgcacttcccgacgtggatcgcgaccagcatgcgccgcctgtacgcccgctatttcgccgacggattcgaggggcacacctacgacatcccggcatggcagaaggtccaccagattcccgacgaagagctgtggaacgagcgcatgtatctcaagaacaagctcgtaaagcatatccgccgccgctacagcgaccccaatcaggtgcgtctcgactcgccgcgccagatgattcagatcatcgagggcatcaagcccgacgtgctgaccatcggtttcgcccgccgcttcgccacctacaagcgcgcctacctgctgttcaccaacctcgaccggctgtcggcgatcgtcaacaacaaggagcgtcccgtgcagttcatcttcgcgggcaaagcgcaccctaacgacaagccgggtcaggacctcatcaaacgcatcgtcgaagtggccgccatgccgcagttcgtaggcaagatcctcttcctgcagaattacgacatggagctggcccgccgcatggtgcagggcgtggacgtatggctcaacaccccgacccgtccgctcgaagcgtcgggcacgtcgggcgagaagtgcgtcatgaacggcgtgctccagttctcggtactcgacggatggtgggtcgaaggctacaaggagggcgcgggatggatgctgcccatggaacgcacgttcgccgatcagggctatcaggacgagcttgacgccgagatgatttacaacaccatcgaggagcagatcgtgccgaaatactacgaccgcggcagcgacggcattcctcaccagtgggtggattcggtcaaaaagtgcgtcgccgacatcgcgtcgaacttcacgaccaaccgcatgctgggggattacgaggagcggttctacaacaagctcgcggcccgcaagcgcgaaatcgtcgaaggcggctacaagctggcccgcgagatcgcggcgtggaagcgcaaggtttcggccgcatgggacaaggtccgcgtgatcgacgtccagcgcgtgaggatcgacgacgaggcgatcttcgtcggcgagaagtaccacttcgaagtgacggtggacatcgccaacctccggcctgaggatatcggcgtcgagatggtcatcgcccagcagatcgtcggcggcggcaaggtgaacgtaacccgcaccatcgggctgaaacacaccaaaaccgacggcagccgcgtgacctatgcgctggattacgttcccggcgaggccggcacgttcgacgtggcgctgcgtctctatccctacaacccccacctgccgcaccgcatggattttgcattggtaaagtgggcctagcaaatttggcgtgaataatgttaaaaaaggtattaatttactgttatcgggtattatttatctgaaaattttaatatctttataggacgaactgcatttttaagaaagatatgtcagcacttactttcgacaaaagcgaattgggcaatctggagtactccctccagcgcgaaatgctctcgacggaccgtatcggcggctacatgagtacgacgatcgtctgctgcaacacccgccgctatcacggactgatggtggcccccatcgacgacagcggccggacctacgtcctgctctcgtcgctcgacgagaccgtggtgcagcacgaccagacgttcaatctggcgctgcaccgtttcaagggggtatacgagccgcgcggccacaagtatatcaccgatttcgagtatacgccgacgccgacgatcacctaccgcgtgggcggcgtaatcctcaagaaggagatgctctggatccacaagcggacgcagctgatgatccgctacacgctcgtggacgcccactccgaaacccggctgcggctgcggccgttcctcgccttccgcgacaagcatgcgctgacgcacgccaacatggaggccgacggacactcctaccccgccgtaaacggcgtgaagtgccgtctctacaactcgttcccgtggctctatctccagacgagcaaacccggcacggagttcgtgcccgcgcccgactggtattacggattcgaataccagcaggagctggcccgcggatacgaggggtacgaagacctgctcacgacgggctatttcgaagcggagctcaagaagggcgagagcatcatcttctcggcgtcgctcgacgaaatgggctcgaccaaaaccatcgaagaggttttcgccgcatccatcgcgcggcgtacgcataagatcgacttcatcagctgcctcgaacactcggcgcggcagttcctgatccgccgtccgggcgaccggaccgaagtggtgtcgggatatccgtggcacggggtttcgggccgccagaccttcatctcgctgccgggcatcacgctcgaacagggacacaaggaggactgcatcgacgcgctggatacgctggtgcgggagatgcgcgacggcatgttcaccggcagcgcctcggccgaagtcgcggcggacgctcccctctggtttttctggaccctccagcagctcgaacgcgaggtgggggccaaggagatatgggcgagctacggcccggccatgaaagacatactggagagctaccggcagggaatcggcggccgcgtggcgctgcacgacaacgggctgatatgggcttcatcggaagaggtgcccctgacgtggatgaattcgacgatcgacggacgccccgtgaccccgcgcaacggctatcaggtcgaagtgaacgccttgtggtacaacgccgtatgctatgcgctcgaactggccggcaaatacggggacaagacggacaaggccttcgtcaaggagtggaccccgcttccggcacgcacgcaggagtcgttcatcgaactgttccgcctgccggagggctatctggccgacttcgtggacggcagcggtcccgacaaatcgacgcgccccaacatgatcgtcgcctgcggactgaattacaagatgctcgacgagacgatgcagctggaggtgatccgcacggtgcgccagcacctgctcaccccgaagggactgcggacgctgtcgccccaaaacccgctttacaggggttcgcaggagggcatgcccgccgaacgcgacttcgccgccaaaaacggctcggtatggccgtggctgctgcccttctacatcaaggcctgcttcgacatcgacggcgacgcattcctgccgcaggccgaggaggcgctggaaaacttcgacgaggacatccagcgttacggcatcggctcgatctgcgagctgtacgacgccgacccgccctacgcttcgcgcggagccatttcgcaggcgtggagcgtcggagccgcactggacatccaccgcatgatccgcgagcggagcaaaggggattcccaagcgcccaaagccgcgaagaaaggcggcagaacgaacggtccgaaagagaaaaagccggcgaagacgaagcccgcggcgaaaagcgccgggaagacggtaaaggccgccgccaaaagtccggccgcggcgaaagcccccaaggccgcggcgaaaaaggcggcgccgaaagcagcggcaggaaaagccgcaaggaaataaaggcaacaaaatgaaaagaattaagatatgagagttttaatgttcggttgggagttcccgccccacatcgcgggcggtcttggaacggcgtgctacggcatgacgcgcggtctggcgcgcaacgacgtagacgtcacgttcgtggttccccacgcttacggcgatgaagatcagcgtttcacgcacgtaatgaacgccagcgacgtggaggctctctatggttcgaccgggagcggagccgacgacattctcgaaaaaatgtcgttcatccacatcgactcgaacatggtgccctacatctcccccgaagagtacgaggtctaccacgaacgctatgtaaaatcgggtcagcaggtctggtccacgaccgacgcatggaaacagcgttacaccttttcgggaaagtacggcgccaacctcatggaggaggtggcccgttacgccgtggtggccgcgcaggtcgccaaggacctcgaagggcagttcgacgtgatccacgcccacgactggctcacctactacgccggcatcgccgccaagcgcgtgtcgggcaagccgctcgtcgtgcacatgcacgccacggaatacgaccgcagcggcgagaacgtcaatacgcaggtctacgccatcgaacgtgcgggcatgcacgccgcggaccgcgtgatcgccgtttcgaaccttacccgcaacatcgtcatcaaccgctacggcgttccggccgaaaaggtcgtgacggtgcacaacgccgtgcgcttcgccggcggcccctgcaaaacacccgaacgcggcgtgaaggacaagatcgtcaccttcctcggacgcatcacctaccagaaaggtcccgactacttcgtcgaggcggccgccaaagtgctcaagcgcgtacccgacgtacgcttcgtgatggccggttcgggcgacatgatgaaccacgtcatccgccgcgtggcgcggctgggcatcgccgaccgcttccacttcacggggttcctgcgcggcgaggacgtacacaagatgttccagctgtcggacgtatacgtcatgccgtcggtctcggaacctttcggcatctcgcccctcgaagcgatgcgctcgaacgtgccggtgatcatctccaaacagagcggcgtggccgaagtgctcgacttcgccgtgaaggtcgattactgggacgtggacgcgctggccgacgccatctacggcctcatccaatacccggccctgtcgggcatgttcgcgtcgaaaggactcgaagaggtcaccaacctcaagtggaacgacgccgcggcgaagatcaaagccgtatacgaagcggtcattgaagagaacaaaaaacaataaaaatacagataccctatgaaaaccgtctgcttatattttcaggtacaccagccttggcgactgaagaagtaccgcttcttcaacatgggcaaggaccacaactacctagacgacctcctgaaccgctcgatcatgcagaaagtcgcccggcagtgttacctgcccatgaacgccctgctgctgaagttgatcaaggagaacaagggtaaattccgctgttcgttctcgatcacgggcatcgccgtcgagcagttccgcgccttcgcgcctgaggtgctcgactcgttcaaggagctggccgccacgggatgcgtcgagtttctggccgaaacctactcccattcgctggcatcgctggcgtcgaaagaggatttcaccgaacaggtgaagctccatacggcgatgatcaagaaggaattcggcgtgaagcccaccgccttccgcaacaccgagctgatctactccgacgagatcggcgccatggtcgccgacatgggcttccgcacgatgctggccgaaggcgccaagcacgtgctgggctggaaatcgcctaactacgtctatgccaacgccatcaatcagaaactgcgcctgctgctgcgcaactacaagctctcggacgacattgcgttccgtttctcgaaccgcagctgggacgaatggccgctgacggcggacaaatacgtcaaatggctctcttcggacgaaacgccgggcgaggtcatcaacctcttcatggactacgagacgttcggggagcatcagacggcggatacgggaatcttcgaattcatgcgggcgctccccaaagcgatcctcgccaagaagaacgacatggagttcgccaccgtaagcgaggccgccaagaagtaccagccggtgtccgtactccactgtccgcacgtaatgtcgtgggccgacgaggagcgcgacgtgacggcgtggctcggcaacgagttgcagaatgaggctttctcgaaactctacgcccagaaagagaaggtcgccgccctgaaaagccccgatttcgactatgtatggagtttcatgcagacctcggaccacttctactacatggcgaccaaatggctctcggacggcgacgtacactcctacttcaacccgtacgactcggcatacgacgccttcatcaactacatgaacgtcctttcggacttcatcatcgagctggatcaagcggtggccgccaaagccgccaaggcaaaataaggctgaaaccgccgcaacacggagggggggggaaggaagcgccggacaggctttgtcggggcgcggcgtctaatacgcccgcgcacgaaacgcccgcgaaatcccgcccgaaatcagcaccgacgacgcggcgctgtccgtattgcagaaaaacggattcaggggtctttcacgccctccgggggtacgatgagggacgcggaaggctggcgcatgaaacgcagccctacagccccgcaaacacgcccgtaaagcccgcatggctctgcggcgcgacggaacggcggaccgaaaaaaacgcccaaaatgccggaaaacgccggggaacatgggaagaacatccgggaaatgccggaaataggctcaaatcaaatcaaatcagccgcagtattgactgcggctgatttttcatataagtcgggacaaaggcacccgatccggcaacagcctatcgtatccggtccgacggattgcagcaacggtcggaacgataaaaaagcggcagaccgcgcctcttcggtctgccgcaagcaggaatgttacttaaaagtgggagttgttaaccaaaaaactttgggatgtgccgttcctgctttagggatttgatttcccgcgctcccggcaccgtcccgaaggacggcgccggatttcgcggaaaagggggattctttttagttggctttctgcttaaccttgatatcaagattgtgaacgcggtccgtgccgtaatcataggatacggtaactttcaccttgaccgtcttctcgcctacgaattcgctgtcggcattacccttgaccgtaatcgtaccggtggttgcgaaatcgcccgcaatcgtaattcggtcaacgagaacctccggattcatcacctcgtacttgacagcgactccgagaaccgcattctcatcggcagccgcagcctcgaacacgttgttgccgttgatattcgccagctggaggagatcgcccacagtcagggaagcatcggcatcgctcgcagaaatcgtagtagcggcactcttacgcaggctgatcgtcttatccttgatcgggtcgggaatctcgacattaagctcctgctcgtcaagaacataagaatcaagcatcagttttacgctgagcgccatgttcaggcccttgtactcagtaccccacgtcagggtcttggcgtcggcgtctaccgaagcgccttcatactcttcagcgtctaccgagaagacaacctttccgatttcattgcccttggaatctttgggtgcaacccaagtgttgtcgaggttaagtccatcgggcacataagccgtcgtcgtaagttttgcgttcagacgcaccggattcgcatagttgtcgccctgtaccagctcgcctgcaaagccttcgaaattaaccgtaacggcaaccgttacatcgagaccccagtcggcagtaagtttagccgtgagttcgtagctcttctcctttgctccggtgccgagcttgatagcgatgttctttgcatcgtcggtcgcctgcacgagttcggttccatcttccgcttcatcggcagtagcctcgaaggtagcggcatagatcgcatctacgaacgtctgcttgtcggcgaagtacttcggagcccaatccttattccagagtttctcggcatacgtctcgatcaccgtgtattcgctcgttcccgccaagtaatccaccgttacggtctccggagccatcgtgatctcaggcataccctcgataacgacgggcagagtaatcgtaatatcggtgttctcatagttgtaacgtgctttgaccgtgtaagaaccgctcgtcattgcactgttgccggctacgacaagttccagatgctgctctgcacgatcgtcagcaggagagctagtaaggataatgtcagcgacatcgaacggcagttcgtcggtcatttcggtctcgccgtcgaagatctggatatcctcgaaggatccagccttcagtgcgttgtaaatcacgtggccgatctgcggcttcgtgggatcgggattcagcaggtaatccacagcctcgtaatcgtcgccagcactaaccgttgcatagttccacgttaccgtctgcggctcggaaacgatgacgtcggtgttgtccttgatgatggtgaactgcgatttggcgttcttaaccacgcggcaggtgtattcgcccgatacgaggtcgaacgagaacggttccgaggtaatcacgtcgtcgatcagagccggaacacccttgccctttttgatcgccgccgtggttgccgtaagcgtatagctgtccttgttatcttcgggatctaccgtcgctacggcggcgtcttcaggaacaacggtcttgagaacgggaacatcctcgccccagattgcggcaagctcctgcggtttgccgtctttcatgtagtaaatcttcacatcatggaagaactcaacgacggtttcctcgtcgttatatttcagaccgccgtcgccctcgaattccgggaactgggtatcgtcgtcaactaccagttcgaggtttccgtcctctttcatacgaccggcaaccagatcggcattgatcgcgccgcctgcattatactgcgtaccgataaaggcactggtgaaatcgctgcccaaatcctcgcccgaaatggcatcttcgggcgtagctccggcgacaccggtgcctgcgagtttcacattcagcgcaatggccagcgttttgccgtttccgtactcgtactgagtcttggcgacaacggtaaacttaccggtcacgacgtcctgatcgatcacgtctacaacctcgaacgacgcagcgctgcgcgtcttgatctcctccgttacgaacgatacgttctccttggtcatcttgactgccagagccgcaggcgaaaccatgaaagtagcttcgatcgcggcctcgttgccgccttcgtcgctgcccagatagaacttgtagtcctcaccttcaccgtcaaccatcgcgatatagggaagtccctcgatggaaatgacattgttcgatacctcttcgagcgaagtcggaacgtaaaccagcgactggatgcggccggcgaggtctgcgatagcgctccagagattgcggagctgcgtgtcgtaattgtcgaaacgatccttcagatcggcttctttcaggtagattgcgctgccgtcggggttgaacagtttgctgtttacaccctcctcgatcatcgcctcgatagcctctttcagagttacgttggcatcggtcagctccttgaggatcgtatcggtgatggtcttgcccatttcggctttgaccgtctcgtcattcatgtactcagccatgtacgaagcgaagttgtcgccgaggaccttcttgatggcatcggtgaccgtagccgtctccgaagatacggaattggcgacagcggtaaggatctggttgatctgagtcgccgacagctgatcggcaccggtgatgtaacctttaccctcgacgaaatccttcatctgctgctcggtaacgtacttgccgtcgaccagagcctgctggatgatcttctgcatttcggcctgcagtttacccatggtctcgtccgaagcgatcatcgtctcgaaaatcttcttgacatcgtcggcagtcagctgattcttggtagcctcttcgatcagtttctgaacgtcagccttggtctgatatccctgagccttaataagtttcaacacctcatcgctagtcagccaatctttcagatccgacttcttggcatagtctgccagccttttgtcaagctctgtctggagaccgctgttggtaacgaaagacgagaaatctatcccgtttaatttgtcggtaacagctttgagggctgaagcgtcggccttcaactcgacttgacccttcaagtcgttgatctgacccttcaggtcgtcgatgtcgtcgtcgtagtctttacaaccgacaccggctaacattgttccggttaagaacagtgcaagaaattttctgaataagttttttttcatagtaatgaagaattgaaatggaattgttttttgtgttgacgcattagttatcaatagagtgacgtatctattttttttttcggttacgggtacatgaacatcggtagagcgacgcatactctaccggtcttgttatccgttaattatcaataaagtgacgcattccttattatccgtgtgacgcattatttttcagtaatattggataaatcatggtatcatatatgatacgcatggtgcaaatatatatataaaaatttgcacaacaaaatttttatccaaatttttgaaatgggagttgtttatgaggaggaggtatcctatatctcctctaggatcagagagttgaggagggagaggcgtctgacggtacaggaactcgcataccgttgcgacatggaaagatccaatttgagccgtatcgaagcgggacgcacgaaccttacggtcaaaacgatgtgtatcatatgtaacgcgttgaatgtgagcttgagggaggtcattcggtaacagagatatacctatatttatatatttccgtgccgttgcaagaagagttctttttttaggctgtttaggtaaattgtcgtatatttaccaaccaaatgaaataagaacccgctgtttgtgaatacaatcgatttgatcgtctgccttattctggcattggccgtatggaacggctggcgccaaggctttgtcatgcagatatgttcgctggccggtatcgtcgcaggtatctggctggcttcacgttacggcgtttatgtcggggcgtggctgaagctggacgcaacggtctccgcggccggcggattcgtcgtggtcctgctggccgtgattcttctggtggccgttgccggacggctggtacgcaagttgtttcacttcgcggggttcggaatccccgacatcgtgctgggcatcgcggtgtcggtgctgaaatacatgctggtgctgagcgtattgttctcggcgttcgattcgctcaacgaggattacacgctcgtcggaccgcaaacgatcgagaaatcgaagagttacaaacccgtcatgcgcctgtccgaagccgttttccccttcttggaatgggtcggcgagcaggtgccgcaggaacaaaaccaggattagccgatggaaaaacgattcaccggaacagtggtgcgcgccaccggaagctggtacgacgttctgcacgacggcgcggtcgtccgctgccgtatccggggccggctgcggctgcggggcgtacgttcgaccaatccggtcgtggtgggcgacgaagtgacctgcgaggccgacgcagggggcgattacgtcatctgcgacatttcgccccgccgcaactacgtcatccgccgggcgtcgaacctctcgaaggagtcgcatatcatcgcggccaacgtcgatcaggctctgctgatggcgacgctgcgttcgcccgaaaccgccacggagttcgtggatcgctttctggtgacctgcgaagcctataaggtccccgttacgatcctgctctcgaaaatcgacctgcaggacccgcaggccgtcgcagactttcatgccgtgtacgaaagcgccggataccgtgtcatggaggtctcctccgccacgggcgaaggcgtcggtgcggtacacgagctgctcaaagggcgtacgaccctcgtttcgggcaattcgggcgtcggaaaatcgacgctcatccgcgccatcgacccctcgctggacatccgtacgggcgaaatctccgaaagccaccacaagggacggcacacgacgaccttttcgacgatgtatccgctggccgaaggcggcgcggtgatcgacacgccgggcatcaagggtttcgggctgatcgacatcgacgatgccgagttgtggcattacttccccgaaatgatgcgcacggcccccgactgccggttttacaactgcacccacacccacgaaccgggatgtgcggtggtcgaagccgtcgaacgggggcagatcgcctatccccgctacgaaagttacctcaaaatactcgatgaagatgaaaaataccgcaaataagggtgctgaatggtacgccgaacgtatcgcctgccttgcggagttcacgacctccgagcgttatgaagtactccgccgcacggtcgccatgcgtacgcgatacatgaccgtgctggccgagaatatgtaccacgggcagaatgcagccgccctgatccgccactgcgaggcgttcggcgtgcaggagatgcacaccgtcgagacgctgtgccgcttcgaacccaatcccgacatcgtgcgcggcaccgaccaatgggtcgatgtccggcgtcatccctcgacgggagaagccctcgccgcactgcgcagtgcgggataccgcatcgttgcgactacgccccaccgcgaagacgtgacgcccgaaacgttcgacgtcgccgcagggcctttcgcactggttttcggcaccgaacacgccggaatctcggacgaggtgatcgccggagccgacgaattcctgcgcatcccgatgtgcggcatggtcgagagcctgaatgtttcggcgtcggccgcgatcctgatctatatgctctccgagcggatgcggctcacggtcggggagtggcgcatgaccgacgcgcagcaggccgagaccctcttcggctggatgcgccgcagcgtgaaggatgcggacgcgatattgcagcggaaattcaaagattgacaatgaataccattttacgcaaacaatttctggcccacgtgggccagacttcgccttcgccgatgctcgtcgaagtcgaacgcgccgaagggtcgtttttctacacgcccgaaggcaagcgttactacgacttggtggcgggcgtctcggtgagcaacgtcggccactgcaatcccgccgtggtgcgggccgtgcaggagcaggcggcgcgctatatgcacgtgatggtctacggcgagctggtcgagacgccgcaggtggaatatgcctcgaagctcgcgtcgctgctgcccggaggactcgaaagcgtctatttcgtcaattcgggggccgaagcggtcgagggcgctttaaagctggccaagcgtttcacgggccgcacggagctgatctccatgcgccgcgcctaccacggttcgacccacggttcgatgagcatgatgggggcgcccgaaggcgaagagtggaaaggggcgttccggcccctgctgcccgacgtgcaggcgatcgaattcaacgatttcgacgcgctgaaccgcatcacgcggcgcacggcctgcgtgctggccgaacccgtacagggcgaagcgggcgtccggacgcccgcgccgggctatctggaagccctgcggcggcggtgcgacgaagtgggcgccctgctggtcttcgacgagatacagaccggtatgggccgcacgggcgaactgttcgccatgctcaaatacggcgttacgcccgacatcgtatgcttggccaaggcgttcggcggcggcatgccgctgggggcgttcgtggcgcggcgcgaaatcatggatacgctgcaaaccgatccggttctgggacatatcaccaccttcggcggacacccggtctgttgtgcggcggggctggcggcgttgaattacctgctggacaacaaggtcgtggagcaggccgaagccaagggcgcgctgtacgaaacgctgctggggagccatcccgccgtgcgcgaaatccgccgcagcggcctgttgatggccgtcgagttgggcgaatcggcgaaactgtaccgcacgatggaactgttcaaggatgccggaatcctgagcgactggttcctgttctgcgacacggcattccgcatctcgccgccgctgacgatctccggggaggaggtgcgcgaaagcgccgcgcttatccgggagtgtctcgaccggctgcggtagccggaacaggctgccaagacatccggcgggacacgattgcgccggaaaacacaataagaaagagggccagaaggccctcttttcattttcgggtgcaaagctgtttccgacgcgatgcccgctccgccgggcgttatttttcttcggcgaacgccttgagcatggcgatctcctccggccagcgctcttcgtcgggcgtttcgaggatcagcggaatgccgtcgaaacgcgcgtcctgcatgatgtagcggaaacactccatgccgatcatgccttcgcccagcggcgtatgacggtccacacggctgcccaatatcttcatggcgtcgttcaggtgcatgcctttcaggtattcgaaccccacgatgctgtccagctccgcgaacgtcttctcgcacgcctcggccgtacgcaggtcgtaacctgcggcgaaagcgtggcaggtgtcgatgcagacgcctacgcgcgacttgtcctccacgcggtcgatcaggtaggccagttgttcgaaggcgaagcccagattggaaccctgtcccgccgtattctcgattacggccgtcacgccgtgcgtcttgtccagcgcgatgttgatcgactcggcgatccggtcgagcgactcttcgggcgcgatcttctgcaggtggcttccgggatggaagttcagacggtccagccccagctgctcgcaacgctgcatctcgtcgagaaacgccgcgcgcgacttctccagcccgtcgcgctcaggatgtccgaggttgatcaggtacgaatcgtgtggcaggatctgggccgggaggtagccgtactggtcgcagacattgcggaaagagtcgatctgcgccgccgtcagcggcgcggcgacccactgccgctggtttttggtgaaaagtgcgaaagccgtagcccctatcttgtgcgcattggcgggggcgttctccacacctcccgaagcgcttacgtgtgctccgatatatttcatgtgagtatctttatattaacttaagacaaagttaaggtttttgtaaataatttcataaatttgcagtgtaattttccagatataaacacttcactatgaaacctttttatctcatattgacgcttattccggctcttctgatcggccgcaccgtctctgcccagatttccgtcgacgaagtcgatgccggggaggagagcgtgacttttcaggacaaactgaaatccatacccgtagatgtcgattatttcagccgcgcccgttacaaggccgagcgcgccgcgatccgcaaggagcgcaactacctcgaattcaacagcggggtgcagggcgcgcttacctcgtacaacgacccttggatctcggtgtcgggcggtgacaactccatcgcgcttacggcggtgatcggcctgcgccatgttttcaccaagaatcttttcaccatcgaaaccaagttcagtgccaagctgggctataaccggatgaaggtggagacgcagcgtctcgatgccgacggcaagccgatggtcgatgacaacggcaacaacattatggacagcgagggcgtctggttcaagaatcaggacgaattcgtggtctcggtcgccccgtcgttcaagatgtccgaaaactggtcctacggttcgatcctgaacttccgcagccagttcgtcaacggctataaatcgcgcacggagcagaaaaaggagcacctcaagagcaagttcatgactccgggttacctcgacatctcgctcggtatcacctacaaaagccccaaacccaaattcccgatcgtgatcaacctctcgccgatcgccctgaacgccacctttgccgaaaacgactggatccgcagacggcaggtggaagaaagagtagacagtgaaggcaaaaagacagtgactgagataaagccggcatacaactacggtatcgaagatcccgacaagacgtcgaaatacgaaggcggttcctcgatccagatcgacttcgaccgcacgttcggcaaaacgggattcctgcgctaccgcacgacgctctactccttctacggctggatcaccgatatcggccagaagaacaagatcagcgactacacgaagttccgccatgcctacgaagaatgggacaagacagccaataaagacatcaaggacaagccccggctgccgatccatccgatcgcacgctgggaaaatacgctcgacatcaaggcaacaaaatacctctccacgacgttaagtttccagctctattacaaccgggcgcagaacgtcgatgtgcagacccgtacgctgctgagcgtcggactgacctatacctttaagaacaaataatttacagcccgacggcggcgtgccgtgcggcgggtgaccgacaatgtacaaaaattcgaaatacaccattctcttcccgctgctgctggcagcgggcgtcgtattgggcctgttgctgggacagtacatgggccgcaacagcaccacttcgcagatcaaaggcatgctccggcagatggccctgccgaccaacaaactgacctacacgctctcgctgatcgagaaccagtatgtcgattcggtggcgatggattcgctggccgaacatgtcataccgctgctggtcaaggagctggatccgcattcggtctacattccggctgccgagatgcagcagctgaacgaaccgctggagggcgagttcgacggcatcggcgtggtcttcaacatggccaccgacacggtgatcgtgctgaacgtcatcccgcagggaccgagcgacaaggccggaatcaaggccggcgaccgcatcatcgagatcaacgacacgctcgtggcgggacagaagattccgcagcgcgacgtggtgaagaaactgcgcggtccgcgcggcacgacagtgcacctcggactcggacggcagggaatcggcgagctggttggcgtcgatgtcgtacgcgacaagattccgatcaagagcatcgaatcggcattccgcatcgccgacggcatcggttacatcaaactggggcagttcgcccgcaccacctccgcggagatggagcaggcgctggcttcgctgcgggcggaaggcgtcaccaaactgatcttcgacctcaggggcaattcgggcggctatctcgatcaggcgattctggtcgccaacgaattcctgcacaaggagcagctgatcgtctatactgaggaccgccatcaccagcaacagcgcgaatatgccgacggcaccggttcggcgcaggacatggacgtcgttgtgctgatcgacgaggggagcgcctcttcgagcgaaatcctcgcgggagccttgcaggacaacgaccgtggtacgattgttggacgtcgttcgttcggaaagggactcgtacagcgtcagataccttacagcgacggatcggccctgcggcttacgacggcacgttattacacgcccacgggccgctcgatccagaagccctatacgatcggcgacgacgaaagctacgaggaggacatttggaaccgctaccggaacaacgagtttttctcggccgacagcatccacttcgccgactcgctcaaacggacgacgcccggcggcaaggtggtttacggcggcggcggcatcatgcccgacgttttcgtgccggccgacacgaccgacgtgacgaaatacttcgtcgaggtggcggggcgcaacatcctctaccgctacacgatcgagtatgccgaccgtcaccgcgaggcgctcaacgccgtgaagacgattcccgaactgcaggccctgctcgacggcgaccggggactggtcgaagacttcatccgctatgcggcgcgtcagggagtagctccgaattaccgcgacatcgcccgttcgcgcaaactgatcgaagcccagctcagggcctacatcggccgcaatacggcactggaggacaacggattttacgccaacatctatcccgtggacaacgtgatagtacgcgcggtcgggatattaaacgagacacgagaaaatgattaaaaagcttatcggtattattgtagcaacggccgtgatcgtcatcatcgtcattgcggctgtccggcgcaacaatttccagtcgatggtactgcgcgacgaaatcgaggaccagacttatccggaaccggtcgcgtcacaacagcctgcggtgccagtccccgttgaaacggagacgacggattccatatccgtcgaagtgatcgattcgcttcggtaagccggaagctttgtcggacgcagcccggaaacgggtgtccggcatatgcatgcaaacggacggcggctctttcgggccgccgtccgtttgcatgcatatgccgccgttcgcacgaatctttctccttatcgtgcagtattcgaagcttttctgcgtttaatatacagaatcagacaagtcccggtttgtacgcagcctccgtactatcctccgtttgcattagaagttccggctgcgactgcagccgggatttttcatttccgaagagccgccgctccttcctgccgctttccggttgtttttccgtcgccctccgggtgtttcccccccccgctttctggttatcattccggctccttctggtcgccttcccgccgccgtcccgttgcagcctttcttaacttatgccgacgattcagggacgcggatattgtaaggccgcggcctttttccggcaatccggttgcccggcaaaacaggttgcccggcagaccgtttggttttccggcagagtgttccggacaaccggtttctcggccggccggcgccccaacgaaaagcagcagtccgaatccggactgctgcatacctcgatagcccttgcgggcgatcagtaatacttgatctccctgccttcgatagccgaaaggaggttgttcgcggcagaggaggcgccgatgcggaacatatccgtattgagccattccggcccgagaatctcctcgacgatcgtatagtagagggcggcgtcctcggccgtgcggacgcctcctgcggccttgaatcccaccttgcggcccgtcttctggtagtagtcgcggatcgcctgacacatgaccacggccgcttcgggcgttgcggctacgtcgatctttccggtcgaggtctttacgaaatcggctcctgcgaacatcgaaagcagcgatgccttgcggatcagatcgggtgttttgagcgcccccgattcgatgatgaccttcagcacgacgtcggcgtccatctccgagcggatcacctcgacctcatttgccgcctcgtcgtattctcccgtaagcatgcggcccacattgagtacgatatccacctcgtcggcgccgttctcgatggccatcgccacttcgagcgcctttacttcgaggaaggtctgcgccgcgggaaatccgccgccgacgctcgtgatcttcatcggagtgccgtccacggccaacccgacggtctcgacgaatgccggatagatgcagatcgaggccacgttgggaatatgcgggaatttctggtagaattcggccgtcttgcgggcgaactcggtcaccgaggtcaccgagtcgttgcacgacagggtcgtgatgtcgatggccgagtaacacattttatatacttccgcattatgattgcgcttcgcggcttcgcggatgcgggcgacctcttcggccacctgcgcttcgctccatgccggagcgtattcattcagatgattggcgtactccataatgtatccctgttttttacaaaattaggaaaaataattcacacccgctatcttcggcctgcaaatattttcccggtatcctgcaaaaaaagggcctgaaccgatggtccagacccttttctcttaatctgacggcgattatttgttcagcgccttcaggttgatgtcgttggcagccttctgagccagtttcgggttcttcgaaacggcgctcttcagctgagcctcagcggtcttcaggtcgccctctttagcggcgatcactgcgcgcaggtagtcggcgtcagccgagttgtccttggcgatagccttcttggcagccgacaggtcgttgttcataacctgagcgacagcctcgttgtaaccgtcgaggttcttggcggcactcttgtaatcaccctcggcagcagcgatagcggccttggcctgagcgtcggcagcctgagcgtacttcttggcctcggcagtgttgccgttagccagattggcgaggatgagattcttgttgatctcgctcgacgagtcggtcttggcggccttctcgaacgacttcagcgcagcggctttgtcaccggccttggcctgagcgataccgaggttgttgtatacgcgggcgtcgttgaacttcttcgaagcgacggtcaggatggcaacctgctcctcggcgccgttggccagcgactcggcagcgtagaggtactcctcgacggtcaggtcctgaccgttcttgaaggcagccatgatctcggcgtcggtcttgccctgaatgtcggtgctgttgacgatctgcgaacggcgcagttcgggaaggatctcctctttcagttcgttgaataccgacgacatgttcttgatctcgctctcacgctctgcggacgagttgtagaggctcagcacctgcagaatgaggttcttgtccttgatgtccgacttctcgaccagctccttgaagccgtcccagtcctcgccgtaagctgcggcgtcgacatccagccccgaatccttcagcagtttggcaacgaccttcttacccgattcgctgcgggctttcgacagcttgtcgttgaacttcacgggaccgtcgggcgaagcatagcccttcacggcgatgttctgcgttgcgcggtcgttctgcaggttggcgtctacgtcggccttgaaggcgtcgagattggctttcttctcgttcttcttggttacgaccgaagagttgatcgcatagagcagatcggtcttgtcaactacggtgtgcaccttcttgtagttgttggccatcggagccatcaggtccgaatatttgaggtccttctgcagggtgttcagaccgtaagcgacggtcaggccgaattccttggccagagcggccttggcagcctcgtcgttgccggccagcacggcggcctgctccttggtcgggatggcgccggtgttcaggttcacgagcgtgaactccttgcacttgccgcccggacacttgatctcggcgcggagctgcagagcacacttgtccatgcggggatcgtacgggaactctacgtgctgcgtatagctgccgccgttcttcttgtctactacggtgtagttctcgtccactttcgaaccttggaggtatttggctgcgcctgcaacctcgccgccctcgaatacgatcacgggagttaccttgataacggctttcgcattgaagtatttgaccgggaacgtaacgttgatgtctgcggctacgatgccgttgttcagcgtcagaatttcgggagtgacggtcaggttgatgtcgtcccggttcttagccatcttcttgaagcaattacaactcgagaatgccagtgcggcagcaacgagtacaacgctcaatttcattagatttttcataatcgtaaaattaatgtgtttatttaaatgtttgcctttttcctgtttctttcgcgtaagttccgattcgcaagacgccgtttgggcgtccgggtttcggaattcaacccgctgaacaacgcaaatatagaaaactcttggtaaatgtgcaatatttcggacgttatttcgatactttttcgtccgaaataagcacattgacagtctgtttactcctctttgcgtccgggacggtcgcggcgctcgcggcgttcgccgcggtcgggacggtcttcgcggggacgacgctcgcgctccacatagccttcgggcttgggcagcagcaccttgcgcgacaatttgagcttgttggtcttggggtcgatgccgatcagcttcacgtcgatctcgtcgccctctttcaggccggtctcctccatggtttcgaaacgcttgtagtcgatctccgaaatatggagcagggcgtctttgccgggcatgatctcgacgaatgcgccgaaggtgacgatcgaacggatcttgccgtggtaggtctcgccgacctccggaatcgcaacgatagccttgatgcggttcagcgcgccgtcgagcgcggtcttgtcctgtccgaagatgtccacgatgcccttgttgtccacctccgtgatggtgatggtcgtgcccgtagtcttctggatgtcctgaatcaccttgccgccggggccgatcacggcgccgatcatgtcctgcggaatggtgatctgaacgatgcgcggcacgaaaggcttgtagtcggcgcgcggctcggcgatgcactcggtgagtttgccgaggatgtgcaggcgtcccttacgggcctgctccagcgcggcggccagcacttcgtacgaaaggccgtccaccttgatgtccatctgggtggcggtgatgccgtccttggtgcccgtcaccttgaagtccatgtctccgaggtggtcctcatcgcccagaatgtccgacagtacggcccatttgccgctctgggagtcggaaatcagacccatggcgatacccgacacgggttttttgagcttcacgccggcgtccatcagggccagcgtaccggcgcagacggtagccatcgacgacgaaccgttcgattcgaggatgtccgaaacgacacgcacggcataggggttctcctcgcccagcggaatcatcggcttcagggcgcgccatgccagatggccgtggccgatctcgcggcggctcaggccgcgtgcggccttggcctcgcctgtcgagaagggcgggaagttatagtggagcacgaactgctcggtgccctgcaccagcacttcgtccttctgcttttcgtcgagtttcgtgccgagcgtaacgctggtcagcgactgcgtttcgccgcgggtgaagatcgccgaaccgtgggcggcgggcaggtagtccacctcgcaccagatcggacggatctcgtcggtcttgcggccgtcgagacgcaggccctcgtcgaggatcatgttgcgcatggccttcttctgcacgtcgtcgtggaagtatttgtggatcagcatggctttctcggccagctcctcctccgaatagcgcgcggcgaattcggcttcgagggcgttgaacatatcctcgcgctcgtgcttcatcgtaccgctggtggcgatggcgtaggccttgtcgtaaagctccttgacgatgagctggcgcagctcctcgtcgttctcctcgtggcagtaggtgcgtttcacgtccttgcccagctctttcgaaagctcgatctgtacggcgcagtgcttcttgatctcctcgtgtgcgaacttgatggctccgagcatcacctcttccgaaacctctttcatctcgccttcgaccatcaggatgttgtcgatcgtaccgccgaccatgatgtcgaggtccacgcggtccatctccgagaatttggggttgatgacgtactctccgtcgagacgtgcaacgcggacctccgagatggggcctccgaacggaatgtccgaaacggccagtgcggccgaagcggccagaccggccagcgcgtcgggctgaatatccttgtcggccgaaatgaggttcaccgtcacgtaaacttcggcgtggtaatccgcggggaacaggggacgcagggcgcggtcgatcagacgggcgacgagaatctcactgtcgttggcgcggccttcgcgcttcatgaagccgccgggatagcgtccgcacgaagcgtacttctctttgtactccacttggagcggcatgaaatcggtgtcgggttttgcgtccttggcggctactaccgtggccaagagcatcgtatcgccctgcttgaccaccaccgagccgtcggcctgcttggccagtttgcccgtttcgatctcgatctggcgtccgtcggccagcgtaatgatcttgcggactgcattgtacagctttttgtcttccataaaaaaaattaacctatagtgtttttcgaatcgttgtctttacgaaaatgaaggcaaccccttccgggaattgccctcatttcttcctcacggattacttgcggaggttgagcgtcttgacgatggcgcggtagcgctcgatgtcgacctccttcaggtactccagcaacgcgcggcgcttgccgaccagacgcagcagcgaacgctgcgtgccgaagtcgtgcttgttgcttttgaggtgttctgtaaggtggctgatacggtacgaaaacagtgcgatctggctctcaggagaacccgtgtcggtgttagacttgccgtactggccgaaaagctcttgctttttctcagctgttaaataagccatttttttgaaatttattcagttccactctacgacgcattccccttaccgtgaataacgccagagcgtccggcaaagttacgaattaattggaaattaagtattaaaaatcaaaaaattattgtcttcggaccgaaaaacgtaaaaaatcgttcgtagatgctattctccgggtgccgggagaggctcgcacggagccgtggcgtcgctgttttccagtcgtttacaaagccggatccgatcccggaaacattcgtccggcgctcaggccggtgtggcaaacgcatcggccgcaacggccgttacgcttgcgccgcacgccgcggagcaatcttttcggcggaaatttcccgaatctcccggaaaatgctatttttgcggctgacaagagcacgttatgacagaaaagctgattcggaaagtctggattgcggtgtccgcggccgccctctggggatgcgggggcgcctcctcctataccgccgtggacggcgtgatgctcggcacaacactgcatattacggccgacgtgcagggcgtctccccgcaggagctctacgccgccgtgatggaactcgaccgcgaagccaaggcgtctatgtcgatcttcgatccgggctcgctgctgagccggctcaaccgcaacgagacggacagcgtagaccgccatatcgccttcaacctgcatctggccgacagtatcggcgccctgagcggcggccgctacgacgtgacggtcaaaccgctggtcgaagcgtgggggtttgccggcaggcaggccgaacggcatcccgacgtcgattcgatcctcgcattcgtcggccgcgaaaaggtccgtgtcgaggagggccggctggtgaaggccgatccccgcgtacagctcgacttcaattcgatcgccaaaggctacacggtcgatctgctcgcccggctggtcgaatcgttcggcgcccgcaattacatcgtcgacatcggcggcgaagtccgctgcaaaggggtcaaccggcagggcgggccgtggcgcatcggcatcgaaaccccgttcgacggcaacatgtccgacggcgaatacgtgcagaaacgcatccgcctgaccgacggcggtctggccacttcgggcaactaccgccgcttctacctcgatgccgacggcaacaaggtggcccacaccatcgacccgcgcacggggcgcagcgccgtgtcgcgtctgctctccgtgaccgtcgccgcgccgacctgcgccgaagccgacgcgctggggaccatgtttctggccatgggggccgacgatgcgctgaaggccgtcaggacgatgccggacgtgaaggtctatttcatcctcgccgacggggccgacggctacgaagagtatatttcacccgccatggaggcgatgatcatgcaataacgatccctatgaaaagcgctgtttttctctacaacacccaatccgggaaatgcaaaatcgaacgctgcaccgaagccgtctgcacggtattccgggcttacggctacgatatcaaaccgcaactgatcgacttcggcaccaatcccttcgacggcaacgagcagatcgacctgatggtcgtggccggcggcgacggcacggtcaactacgtggtcaacgccatgaaaaacaaagggctggacatcccgctcggagtgattcccgccggtacggccaacgacttcgcgggtgcgctaggcatgtcgcgccatccgctcgaagcggcgcggcagatcgcctccggcgcggtggaccgcgtggactgcggatgcgtcaacggactctatttcgtcaatatcttcagcttcggcatcttcacgaccacctcgcagcgcacgcccgaccagcgcaagcacaagatcggcaagctggcctatctgatcgagggcgtcaaggagctgcgcgcaatgcacgccgtgccgctcaaagtggtggccgacggacaggctttcgatttcaactcgctgatggtgctcgtcttcaacggcgagacggccggcggcttccgcctcgcgcgccgttcgtcggtcaaggacggcctgttcgactgcatcatgctcgaaaagaagaacttcctccgctcgacgctggccatgggccgctatctgctgcgaggcaatccgaagatcgtccgccaccttcaggtgcgttcgctcgacatcgtatcgacggtcaacgaaccgacggacgtcgacggtcagaaaggggccgaattcccgctgcatatcgagtgcatcgccggaggtctccgcatcatgtgcccccgtggggaatagcgccgtttcaggcgtttgaaaggcgtttcaagacggtcgtttccgacgccgacgccggtccggctccgttatttttcgtccggcctattgcaatttcggacgaaaattgttacatttgtccgaaaaaccacgacgatatggcggatagcatcaaaacgacacgcgcgacgcgggaaggaggacgtgagaatttgcggaaagtttcgatctcacgcatcaaaaaggagatgagcgacgtcttctacctgtcggacgatctggttatcaccacactcgacgcgcagaacaacacgacgtccgactacccggcttcgatcgacggtttctcggccatcatcatgatgacgggcgaagccaccgtgtcgatcgacatgcagaactacaacgtcaagcccaacaccatcgtctttttcaatccggacagcatcatccgcacggtgaaatgttcgtcgaacgccgcggcttattttctggcgttctccaaatcgttcgtcaatgagatccagatcgacctctcgacgtcgctgccggtctacatgcgcttcggcaaggcccccgtgctggaggtcacgccgcaggacgtggaccagatacgccagctcttccagctcatcaaaaccatgctgcgcagcgacaaggagcgttaccgccacgaaatcatccgcacgcttttcaccacggcgttctacatcatcacggagatcaaccagcgcgagcagcccggcgagatcaagcagggtcgctgcgaagtgctcttcgacgaattcatgtcgctgctgcaacagtacaacaaacgcgaacgcaacgtcagcttctacgccaagcagctcaatatcacgccgaaatatctctcgtccgtggtcaaggaggtgagcggcaaaaccgccgcgcgctggatcgacgaatcggtgattctggaagccaaggcgctgctcaaatactccggcatgagtattcaggagatcgcctaccacctcaacttttcgacccagtcgttcttcggcaaatacttcaaacagcacaccggcaccagcccctcgcgctacaaacgcaaaggctgagccgcagatacggcacgaaaccctctcccggagagggttttttgttgtctccatccgaaaagtacggggatgcagcccggtattcgtcgatataacatgaatttcgagcggccgtttctcagctgttcgacgcttattttgtaaaccatagcgtaaaccggaaaaacatgaaaatccccaaggcgaccgtcacggcggtcctttacaaatcgaagaccctcgccagcggcgaacaccccgtcatgataagggtctgctacaacagcaaacgccgatacaaaagcacgggactctcctgtccggcgaaatggtggaacgccgcgaagcaggaggtgcgcgaacggcatccgctggccccgaacatgaacgccatcatcggttccgaactgacggcgctgaaaaacaaagtgctggatttcgagcggcagggggtgccctactccgtgcagcgcatattcgaggcttcggtgcggaaacctccgccccggaaaaccctgtacgacctcttcgaagagcgtatcgcttatttcagggacaccctccagaaacacaacacggccaccggctaccagacgctgctccatatcgtcgaacggttctctcagcaccggaccgtcgagctgttcgacgtggacggcgcatggctcggcgagttcgaggagtacctccatgcgcgttatgccgatacgagcatcaaacggtttttcagcgccctgaaagcgttgatgaactacgcctgccagaacggactgctggacgccaatccgttcgaccgcttccgtctgagccgcaggctcgacgtgcggaccgccaaacgggcgctcgcgaccgacgaactcgacagcctgatccgttactacctcgatacatattattataagacccggaagaggcccgatccccggacgatgaaaagacgctgctggcgcgcgccgagctgcggatgccggggcgaggagcggcaggcgtcgtacgacgccgagcagttcgcgctttcgatgttcatctgctcctatatttttcaggggctggcgctggtcgatctggcccgcctgaagtggaaggacctcgtatgcgtggagattccggaccgggagaagtacgaccgggattgtgcggcctacggcccccggtatgccgaagcgcataaggagacggtcgctttttatgaaatcaatttcgttcgcgccaaaaccctgcatccgatccgcattctggtcgaacagcgggtggcgtggccctatatgaagccgttcgcccgcacggcgaagggcggcgccggagacgacttcgtttttccgatctacttcgacgacgacccccaacgccggttcgaacgcataacctatgccaacaacgtgataaaccaagggttgcagcgtgcggcgaagcgcatcggcctgtcgcggaaaatcaccttctattcggcccgtcacacctatgcgtcacgtctttatcacgccgacgtgccgctgcccctgatcgcccagaacatgggacgcaaccctgcggaaatcgaaacctacctcaaagagttcgacacggacagaatcatcagcgccaacaagcgggtctggcaaatccccggccccgcctccaaagacccgaaaaccggtgccggtttgtaaacctccatgtaaaccgagtcgtcatgcgaggttgtaacatcataaatatcaatatataacttgacgtgtattttgttcttaaccggaacaatgttagccggtgtcggttgtaaagactacgacgacgacatcgacaaactcaacaaccgcctcgacgagttgaccactggtaaaatcgcgactttggagtcgcagctcagttcgttgcagacatctgtcgataacctgaagagtgccgacgaagctctcggtaaacggatcgacgaactaaagagtgatgcagatgccaatgccaaggacatcgaggctttggagaaggcacaggaacaactccagaaggacatcgaagctatcgaaaaagacctttcggacaattatgttacgaaaagctatctgaacacgacgctttcttcgtatgcgactaccaaatacgtgggtgacgccgtagcggccgtaacgcagaaccttggcaaatttacgacggagaaggctattcaggatgccatcaatgcagcaaaagacgcagctataaaggctgccggcgacgcctgcaaggatgcattccagacttcgttcgatgctgccgtcgcttcggccaacctcgtgaacgagaccaagctgaccaaggcgatcgacgattacgatgtaaaaatcaagcaatatcttgaagatgccgtaacgaaagaggacggtttcatcaacaaggctattgctcaggctgtaagtgacgctgtcgcagacctgcaagccatgatttcaggccgtctgaccagcgtgctgctgattcccgacctttatgtcggcggcatcgagaccatcgagttgaaatcgttgtcgtatgaagcttggaaagtcacctcgaccgcatcggccgagaccgtggcacaaggttcgacgacttctacgaccgcagcttcggctacttcggtacgctacaacgtaagcccctcggtcgttacgaaagaggatgtcaaagagccgagcttcgtattcgaaaaggctgaggttcgcacgcgtgccgctgtcagcgaacaactgctgagcgtcgcttcatgggatatcgctggcggcgtgctgaccgtagacgtgaagaagactgcaggcaccgctcttacgctggatgctaaccatgtttacacggctgctctgaaagtacccctcgcagacaaatacctcggcgaaggcgaagtaggcactgctgtatattcggattatgtcgcgctgaccgaaacggccatcgaaccgaaaatcgcagctctgatcgacctgaactctggtaaagcgacagatggcaagttcgagtgcgacgaaactgcaacccactatcatttctcggctaaatacgaggatgcacaggctgccgatccttcgttcaccgaagcatacaacaaaccgatcgacctgctgtcgatggttaccggctgctatatcgataacgacgaagccaaggaaatcaccaaagagacactgaaagccgccggccttgagttccgtttcgcactgccgaccaagccttatacggtaggtgacaacgataccgaccagcagaaattcgccagcgtagccaatacggacggcgcatggacgctgacctcgaaactgcccgacggaacgaccaacaaccaagcagccatcgacaagacgccgatcgttcgcgtcgagctggttgacgtaaacaacaagaacgccgtcgtcgatgtccgttatttcaaggtgcagtggctgagggagaagatcgctccggttgatctggagattctcaagacgttcaactacacgctgacttgcaacgctttcaccggttcgttcacttgggaagagatggttaccaaggtgctcggcaagctcggtgagaatggtctgtcgcaggctgagttcatcgcaacctatgccgcacccgaaattaccgcaaccgaccataccgtgggtacagtggctcaggctgctgccgatggtgtcgagctggtttacaatttcgatgccgccgctgccgagtctgctgccgccttcacatggacgctgtcgcctgagcagatcggcaatgtgatcgcagacctgatcgccggcaaggaagtgaagaaggttgtcaatgtgacgattcccgcacagaacgcatatcagggcaaactcactttctcgttcgttgtgaacattaagaagccgaccctgccttcgatctacggttacgactcctcgttctggcactcggattacacgctggcatatgtttatcccatccagtacaatacgcccggtgcatatgcgacctgcgcataccgttatgaactcgaccgtctgttctccgacagcaaacctgtcaaagatatgcttccctgcggcaaatgggatatccagttcgccaagaaacagcctgctacgggttacgctcccgcactgactggcaacaccgaacctgccggcgaaaccgacaagacgggttacacgctgaaaaagggcgctttggatgccgttcagctcaactacaacggtatgggtgacaactggtacgctccggaaaccacgaacacgggcgccgtaaacgctgctgccgctgctgacatcaccgtacaggtactcaacaacgaagccggcatcggtatcctgaaacagcaggctacgctcaaggtttgggctgcaatcaatccctacaaccacattgaactgaccgacttcaatgtctacttcgtcgaacctcttaagatcaacaccgagctgaccaatgcatacttcgtagaccagattatcagcgggtccgaggttgactgttcgaaagccttcacgatgaccgacttcaaggactacatcgtggctgaggtgacgaccggtacgggcgagaaggagaaatatgctgccgaactctatgcctactatgcagtgaatgctcccgcatgggaccttgcaaatgccaagaccaacctgaagaaggatgccaacggcaactacgtagtggatgaagcgatcaccgcagagactgccaagatcaaggctgcagaccgtttcggtgtgaactgcatcactaagaatggctcgaagctcgtcttcaagaatatcaacggcgtgaaggtcgagaagaccgtcaagctcttcattccggttaccgtcagccacaagtggggtacgatgaccgccaacgtgacgatcgagctgcaccccgaagagcctgctaactaatccccctttcccgctattccggcgccgtccttcggggcggtgccgggaacgcgggaaatcaaatccccaaagcaggaacagcacatcccaaagtttttttggttaacaacaactcccatttcaagtaacattcctgcttgcggcagaccgaagaggcgcggtctgccgctttttttatccggaatctccgcaatattcttccgtctctccggcacactgcggccgccggcacggactccgccgccggccgggccgtctgtccggccaatcgccgtttcgaaatccgccccgcaatacgtctgggaggtccgcagacggcggttatccggctgtcggcccccgtccgacaacggcttcgcgcccgacggcatccggcggcgtgcatctcaaaaatttgattttgaaccgatgttgtattatctttgcatgcggacgcataataaattcgggaaccatgaaaagatacatagcaacactcttgctccttgccgcctgcgcttcggtgcaggcccgcgaggtatttccgctcaacgaaggatggcgtttcttcttcaagtcggagaacagcagcgacaacgcccggcacgtaaccctgccccacacatggaataccgacacgggagcctgcggttatttcctcgaaacgacagccaattatcagaacgacatgtacgtacccgccgaatgggcatcgaaacggttgttcgtgaagttctacggcgtgcagaacgtcgccgacctcttcgtgaacggctatcatgtcggcgcacaccgcggcgggtccacggccttcaccttcgaaatcaccgacaagatacgcttcggcgaggacaatgcgctgctggtcgtggtgagcaacaacagccgcgacgacgtgctccccgcttcgaccgacatgaatctttacggcggcatctaccgcgaagcggagctgatcctgaccggaaagacggccgtttcaccgctccacctcggttcggagggcgtactcgtgcgccagaattcggtcaccagcgcgctggtcgaaggcgaggcggagatatatctcacctcggcgggcgaaagcacctgcatgctgacgctcgacatcacggccccggacggacgcaaagtcttcaccaaacggcagaaaacccgtctcgacggcagacccgtcgtcatccccttctcgatcgccgatccgcagttgtggagcccctcctctccggcgctctaccgggtaacggccagcatcggcgaagagaccgtaacggacagcgtgacggtacgcacgggtttccggaacattcaggtaaccacggcgggcggccttacgatcaacggcgagcgcattccggttcatggcgtgacgctctaccacgacaacgccatttcgggcggcgcggttctggcgcaggattacgacgccgacctgcagcagatccgcgatctgggagccaacgccctgcgttcggccgtcatgccccacgcgcagtatctctacgaccgctgcgacgagcagggcctgctggtctgggtagactctccgctgcaccgctcctcgtttctgggagacgtggcctacttcgccacgccgcagttcgagcagaacggcatacagcagctgcaggagatcatcgcccagaactacaaccacccttcggtggtgatgtggggcatcttctcgcggctctggatgcgcggcgacgacgtgacgccctacctgcgccggctcaacgacacggcgcacgcaatggaccgttcgcgtccgacggtggcgtgcagcgaccagaacggtggcctcaactttatcaccgacctgatcgtctggcggcaggacgtcggctggcgcaaaggctcgaccgacgacgtggccgtatggcgcaaccagctgcagaagaactggtccaacctccgttcgggcgtatgttacggaggcagcggcttcatcggccacaagagctacacggcgcagaccgcaccccgctcgaactggatgcccgaagagcgccagacgcgcttccacgaggaatacgtgaagaacctgcagaacgattcgctcttctggggtacgtggatcaacaacatgttcgattacggttcggcgcgccgtccctacggcatcaacggcgaggggctggtgacgatcgaccgccgcgagcgcaaggacgcatactacttatacagggctttgtggaacgaacggaagccgacgctgcatatcgtcgacaagcggcgcagcctgcgcgaccgcaaccggcaggcgttcagcgtctattcgtcggtcggagcgcctacgctgttcgtgggcgcagacaccgtggcaatgacccaatacgccgcctgccagtaccgttccgactcggtggaaatacagggtatcgtgcaggtgaaagcagtggccggggagcagtgcgacagcgtaacgctcagagtcggcaacgtgctaaaaccgaagcggcagccggtccctcggcgaacagcaggtccgcaacagacaaattaggctggaaaggcatgcggtcggaaaagacctgcacataggtttcggcgataaacgccggaccctcttttttgcgcttgggacgcaggtcgaggtccccggcggcggcatcgacatagctctcggaaaagtccggcatcgggacatgcgtcagcgaacagagcagttcgagcagtccgcggttgtaatcggccagaaatccgtactcccggcggtagaaaggctcgaaatattcggcgtagaaatcaaaatagggcgatcccttgtacgaagcgaccagcgcgccccaatgctgatgctgccagcgtttcgaatagtcgatccgcacatcgcgcaccggctggcggggccggttggcattgcgcacatgcaccgtcagctccatcacgccgtcggtggcgaggatgcgggcgcggttgcgctccgaacgcttcacgaagtgttcgcccagatcgacgacgcaccctccgcgcagcaggtgcgcgaagtactcgaccgaggggaggtatgccaagggcagaacggtcatggctccacccagtcgccgttgtcccggatcagttcgacgagccggtcgagcgcctcctcctgcggtatgttgcgctcgacgaccgtacggcccttgtagagcgtgatgcgccccggagcagcgcccacgtagccgtaatcggcgtcggccatctcgccgggaccgttcacgatacagcccatgacgccgatcttgaggtttttcagatgcgacgtgcgcgacttgacggcggcgagggtcttctcgatgtcgtaaagcgtgcggccgcagctcggacaggcgatatattcggtgtgcgagaagcgcacgcgcgccgcctgcaggatcatcagctcgatattgcggatctcttcctccgcgaagcccggcgcgtcgatccagatgccgtcggccagcccgtcgagaaacagcacgcccagatcggcggcggccttgacagctagcgtctccggcgaagtctccccgtaacggcgtttgaccacgacgggccggggcgtgtcgaggttcaggatcgcagcccgcagttcggccgtcggattctccgacacggcttcgatcacgcaaaagccctccagcggctcggtgtggacgaccggcaccgcgacgttcgtacggcggcggtattcggtcggcgaatagcgttcgggatgcagtacggggaatttgcccggccgccgggcgaaatgcttcaccagcagttcggcgacggggatttcgttttcgggcgcttcggtcagcgaaacgcggatcgtatcgccgatgccgtcggccatcagcgccccgatgcccacggcgctcttgatgcgcccctcgatgccgtttccggcctcggtaacgcccagatgaatcggatagtgcatatcttcggcgtccatcgcttcgaccaagagacgataggcggcgaccatgacccgcgtattgctcgacttcatcgacacgacgacctgatcgaacccctgcgccttgcagacccgcagaaactccatcgccgagacgaccatgccctgcggcgtatcgccccagcggtcgaaaacgcgcttcgagagcgacccgtgattgacaccgatgcgcagtgcgacgccccgctcgcggcattgggcgatcagcgcctccagctcgccgtgatccgtacggtaattgcccggattgatgcgcaccttgtcgacatatttcgcggcgatggcggcgacctccggcacgaagtggatgtcggcgacgatcgccgtgtcgaaaccgtcctcacgcactctccgtacaatgtttgcgaggttctcgccctcgcggcggccctgcgccgtgagacgcacgatcccgcctccggcacggtcgatccgctcgatctgggccgcgcaggcttcggtatcgttggtgtcggtattggtcatcgactgtacggcgacaggatgcccgccgccgatcacgacccgcccgatgcgcacttcgccgctcggacggcggctgtattccgaaagattcataatcgttcacgcttgcaacgcagcggaccgcaccgtcccgtcgcagcgccggattgctccgaatactgccgggacacggcctgtccgtgcgaaaatatctttgacaaagacagtgcaagtcgagcgcagagccgaaaatcggctatgccgagacgccgcctgtctaagccggagtttatcttcggcaaagataacacacaattttgcgaactgcgaataattcgctatatttcgaagaatccccaatcctgcgcaccatgaaacccaccctccggaaacgtctttcctacctcctgctggcgctgctggacttcgcatccgcctgcgacagggagccggtggatcgaaacagcgccggaaatagtatctttgctgccgaaatacaacctgtcatcatgcccaaaaacatgtccgcactccgacctttcctctttgcactgctgctcgcggcgacggcagcggcctgcacgttccgacgcatcgacatcggaaacgacataaccgtccaacgccttgccgaaggcatctatctctacacggccgtcgatgagatcgagggctacggtcccgtgccgtcgaacggcgttctgatcgtacgcgagggcgaagccgtcctgctcgacacccccgtcggcgatgcgcagaccaagacgctgaccgactgggcggccgaaacgctccgcgcctgcgtcacgacgttcgtgcccaaccactggcacagcgactgcatgggcgggctgggctatctcaaaacgctgggcgtgaagtcctatgcccaccgcctcacccacagcatcgcgcaaagggagggcaagcccgttcccgacatcggtttcggcgactcgctgcggctcgacctgcacggcacggagattaggtgctattatttcggcggcggacacagcgaggacaacatcgccgtatggattccgtcggcaaaactgcttttcgcgggctgcatggtcaaggagatggcggcgcagaacgcgggcaacctctcggacgccgtcccggcagcgtggcccgcgacgctggacagcctgctcgtgcggttccccgacgcgcggatcgtcgtgccggggcacggcgcccccggcggacccgaactgatccgccacaccaaagcgctgctctccgaagcagcttcaacagacaatcggcggaaagaataaaggaaaacactgcggggattatccgttttttcgcatattttcggaatatcggatgcgtttcggacttgtccgaaaataaatttttcgttttgtcgcccgactttcattatatttgtcgtgtggagtatctggacaacgatataaaatacgtaggcggcgtcggcgaagcgcgcgcccggcttctggacaaggagctgggcatccgcacgctgggcgacatgctgagccactatccgttccgctacatcgaccgcacgaaagtctaccgcatcgccgaaatcaccgagggcgcgcccacgctcctgcagttccgcgcccgcataacgggggtggcctatgccggtacggggcgtaaaaaacgcttcacggcctacgtacaggacccgacgggatcggccgaactggtgtggtttcagggcatcaaatggatcgaaaaacgcgtcgaagtcggacgcgagtacctcatcttcggacgtccgtcgttctaccgcggacttctgtcgatggcgcatcccgaactggagaccatggagcaggccctttcgcgcaaggccgaaagcggcatgcagggcatctatccctcgaccgagaaactctcgaacgtgctcggcgccaaaggcatgtaccagatcatctgcaacacatgggcgctggtcaaggaccatatcacggactgcatgcccgaagcggtgcgcgcccgctacggactgatcccgctgcgcgacgcctactacaacatccacttcccgcagtcggccgaaatgctcaggcaggcgcagtaccggctcaagttcgacgaactgctgggcatccagctcaacgtccagtcgcgccgcacggaacgtctgtcgaagaacaacggctttctgttcatgaaggtcggcggggtcttcaacaccttctacaacgaaaagctccccttcccgctcaccggcgcgcagaagcgcgtcgtcaaggagatccgtcaggacaccgtgacgggattccagatgaaccggctgctgcagggcgacgtgggtagcggcaagaccctcgtggcgctgatgtcgatgctgctggccgtggacaacggctttcaggcctgcatgatggccccgaccgaaatcctcgcccgccagcacttcgcgacgatcacgcgcatgctcgaaggcatggacgtgaagacggcggtcctgaccggatcgtcgaaggtcaaggagcgccggctggcgctcgaagggatcgcgtcgggcgaagtggacatcctcatcggcacgcacgccctgatcgaagaccgggtgcagttcgccaacctcggattcgtggtgatcgacgaacagcaccgcttcggcgtggagcagcgcgcccggctctggaccaagaacgaacagccgccccatatcctcgtgatgaccgccacaccgattccccgcacgctggccatgaccctgtacggcgatctggacgtctcggtgatcgacgagctgccccccggacgccgtccgatcaagaccgtacattacaccgatgcggcgcgcctgcgcctgttcggattcatgaagcaggagatcgccaaaggacggcaggtgtacgtggtctatccgctcatcaaggagtccgaggcgatggactacaaggatctgacggacggttacgaagccatctcacgcgatttcccgctgcccgattacgtcaccacgatctgccacggcaagatgaagcccgccgacaaggaggagtcgatgcgccagttcaagtcgggcgaagccgacatcatggtcgccacatcggtcatcgaagtcggcgtggacgtgcccaacgccacggtgatggtcatcgagtcggccgagcggttcggactctcgcagctgcaccagctgcgcggacgcgtgggccgcggcggcgaacagtcctactgcatcctcatgtcgggcgaaaagctctcgaaggagtcacgggcgcgcctgcaggccatgtgcgagaccaacgacggcttccgactggcggaactcgacctcaagctgcggggcgccggagacatcaacggcacgctccagagcggcatggcatttgatctgaaaatcgccaatcccacgctcgacgtgcagatactcaccgtctcgcgcgaagcggcggcggccatcctgaccgccgaccgcgatctctcgctcccggaacaccgcggactgcaggagctgaggcggaagtattcgggacaagaagagattgatttttccatgatttcgtaatatttcaaaaccaccgaacgtttatcctaaaaaaccctgtccatgaaacgattgcttatcacgatactattcctttcggccgtcctgcccctcccggcccagctctaccatccgggcgagcagctcttctaccgcgtgagctacaaggccaagatgttccctaacaccgaggtcggcgccgtggaggtcaagaccagcgacagcgaaatcgccggccgcaaatactacaaggtcgagggcatcggccgcacgctgcccacctaccgctggttcttcaacctcgaagacatctacacggtatggatcgacccggagacaaagcgccccgtacgtttcgaaagcgacctgcacgaaggcgactatacgttccagagctactacaactacgactgggagaacaatcaggtcttcacccgctggcgccgccgccagaaaccctatcaggagaaaaccatgccgctgacgcccgaaagcatggacgccatcgcgctcttcttcaccatgcgcggatccgacgccgacagcttcaagcccggcgagccggcgacgctccagatggtgcttcaggacacgatccggcacctgagctaccgcttcatcaaccgcgagacaaagaaaatccgcaacatgggcaaattcaagaccctgaagttcgaatgccagctgggcaccaccgaaggattctcgtttaccgacggcacggtcttcacgctctggatctcggacgacgagaacaaaatcccgctttacatcgaatcgcccgtgcgcgtgggcagcatcaacgcctatatttcgggctacaaagggcttaaatacccgatgacgagcctgataaaataaaaattttatatctttgcagaaacgaaagttaccccggcaacatcaaattaatcctatttccgaaaaaccagcttttatggaagaaaataagcaaggatacgacccctcggaattcgaggacgacgactacatgactccccagcccgacgcgggcaaatccatccgcggctaccgcatcgtcatcatcatcctgtcggtgattctggtggccctttcggcgctctatttcagcatccaccgccagcagatgatcgacaaccggctgctgcagagcgaccgcgactcgatccagaacgatctgggacggctgatgaccgacttcgacaacctgcaggtcaccaacgacagcatctcggcggggctgaccatcgaacgcgaccgcgccgactcgctgatgacgcgcctcaagaaggagcgttcgtggaacctcgccaaaatcaagcagtacgagaaagaggtaggtacgctgcgtacgatcatgaagggctacatccgtcagatcgactcgctgaatacgctcaacaagagactcatcagcgaaaacgtcggctaccgcaaggagatctcgtcggccaaactgcgcgccgaaatggccgaggagaaggccgccgaactggacaacaaggtccgtgtcggcgccgtgatccgcgcccgcgacatcacgctggcggcgctcaacgccaacagcaaaccggtatcgcgcgtcaagaacgccgcccgcctgcgcgtggacttcgtgctgacggccaacgaactggcgacgccgggcgaaaagacgatctacgtgcgcatcacctcgcccgacggctacgtgctgaccaccgaagccatgccgaccttcgacttcgagggcgaacgcctgagctattcggccatgcgcgaagtggactaccaaaatcaggacctcgacgtgggcatcttctacaacagcaccggattcgccgcaggcacctacaccgtgcagctcttctgcgaaggccgcctgatcggcacctcgcaaatcgccatgcgctaaccgcggcaccggggtccggcaatccgccggcccccggctgcaacccgcacgaacatatgaattcccggtcttcgtagcgaagaccgggaattctgttttcggcagcacgcacggcctgccggaaaggaaagagcacgcccaacgaaacgggcaggaacgcaacagaggcggaggacagcggaagacagcgccgaaacgaaataaataagagggagaagtccgcggacttctccctcataccccgtaaaccggcggcccgaatcggagcgaaacagaccggcccggcgaatacggcttatttgttctcctgctgccagatcagggccgaagcgccgagaatggcggcgttcttgccctgaataccgctcggaagcagtttcaccttgttcttgaatacgaaaagcatgttctcttccatgtaccactgcgtgggttcgaagatcagcttgcccgccttcgacagacctccgaagaggaaaatcgcttcgggagaggtgaccgtcaccacgtcggccaatgcacggcccagcagctcgcccgtatagcggaaagcctccagcgccaccgggtcgccctgctccgccgcagccgaaatcatcgacgcatcgaagtccgcgaaggcaatgtcgcgcagtttgctgggcgccgtcatcgtcgccatcagctcgaaagccgtgcgcttgatgcccgtcgccgaaacataggtctccagacagcccctgcgcccgcagccgcactcgcggccgttgcgctcgacgatgatatgaccgaactcgccggcaaaaccgtcgtgtccgtagatcatctcgccgttggagacgaagcccgaaccgagtcccgtgccgagcgtaatcatcacgaagtcgcgcatacctttggcgttgccgtaaatcatctcgccgatcgtcgcggcattggcgtcgttggtcaccagcaccttcacgccgccgaaacatctgccgatatcgtcggccagcggaaagagacggcggctctcgtcgggattggggtcgccctcgcggaatttccagaggttggcgggattctcgaccgtacccttgtggaaattggcgttgggggcgccgatgccgatgcccgtcagctcgtattcgaacgaaagactgtcggccagcgcgtgcatcgcctgacacaaatcttcgacgtaagccggataatcgtctacatgaggatatttcttggtcgaaatgaccgattcggcatagaggtcgccgttctcatcgacaaggccgaaggcggtgttgatgccgccgatatccacgccgatcgcgagttttttcataatatgtccggtttaaaaaagttagcaattatcaggtcaaagttaatccaaaattcggctactccaaacttttttcctacttttgggacagattccgctccaaaatgtagtactacaatgatgcaaacgaacgagcaactgctcttggcaatcgaaaattatctggcccagaccgagttcccggccgaacccgaacgtctctacgcaccgatcggctattcgctggcgggcggcggcaaacgcctgcgcccgatgctgctgatgctcgcacacggcattttcaccgaccggtttcaggccgccctgccggctgcggccgccgtcgaggtgttccacaacttcacgctgctgcacgacgacatcatggacaacgccgccgtgcgccgcggcaaaccttcggtctatgccaagtgggggccgagcgtggcgatcctttcgggcgacgccatgatgatctgcgcctaccgcctgctgagcgaagtgcccgcggagctgctgccccggatactgggcacgttcaacaccatggcgctcgaagtctgcgaaggacagcagtacgacatggacttcgagagcaaacgaaaggtctcggtcgtggaatacatgcacatgatcgaactcaagacctcggtgctgctggccggctcggtcaccatcggcgccatgctgggcggcgcctcggaggaggactgccgcaaactgcgccgtttcgccatcgagctggggctggctttccagcttcaggacgacctgctggacagctacggcgacgaccggctgggcaaagccatcggcggcgacatcctcgaaggcaagcagacctacctgatgattacggccatgagccgcgccgacgaagcgacgcgcgaagcgctgcgcacgacccgtctcgacgcgcggctgtccgacgccgaaaagatcgccgcggtaaaatccatttacgaccggctcgacgtgccgcgtctgaccgaacagcagatttcgctgcggttcgaacgggcgctctcgatcctcgatacgctgtcggcggacaaggcccgcacgcagcgcatccgcgaatacgccgaaagcctgataggacgcaaaaactgacatgcgacgttccgatatagagatcatggcccccgtggggtcgtacgaatcgctggcggcggccattcaggccggagccgattcggtttacttcggcgtcggcaaactcaacatgcgctcggcgtcggccgccaacttcacgctcgacgatctggcgaagatcgtcgccacggcacgcgccgcaggcgtgaagacctatctgacggtcaataccatcgtctatgaagacgagctgcggaccgttcacgaggtgatcgaccgcgccaaggccgagggcatcgacgccgtcatcgcctccgacttcgcggcgattctctacgcacggcgcatcggcgtcgaggtccacatctcgacccagagcaacatctcgaactccgaagccgtgaaattcttttcgcagtgggccgacacggtggtgctggcccgcgaactgacgctcgaacaggtggcgcggattcaccgcgaaatcgccgagaacgacatccggggcccgcgcggcgaactggttcagctcgaaatgttcgcccacggcgcgctctgcatgtcggtttcgggcaaatgctatctttcgctctacgagaccaactgctcggccaaccgcggcgcatgccgccagctatgccgccgcaaatacaccgtcacagacaaggagaccggcgcggcgctggacgtggacggccgctacgtactctcgcccaaggacctctgcacggtcgattttctcgacaagttcatcggcgcgggcgtccgggtgctgaagatcgagggccgggcgcggggcgcggagtatgtcaagcgcgtggtggagtgttacgacgaggcgctgcgcgccatcgaagccgggacatacacgcccgaactggccgccggactgaaagagcggctcgctacggtcttcaaccgcggattctgggaaggctactacgcaggacgacccgtcgccgaacacagcgaacattacggatcggcagccacgcggcgcaaggtctacgtgggcaaggtgaccaacttctacaaaaggatatcggtggccgaagtgctggtcgaagcggctccgctggccgtgggagaagagatattcttcatgggcgccacgacgggcgtcgccgaacagacgctcgccgagctgcacgacaccgacggaaagcccgtcccgtccgtcgctcagggaaccttgtgcgcggtacgcacccaagggacgatacgccgcggcgaccagctctacaaattcgtcgatgcgcaatagcccgcgccggccggacagcacgtatgccggacgacatatatatcaaggaaacgccttcgggcgtttttttcgttacgattttcagccagcgaaagcactcagacccgcttatcataaaatttttatcgaaaaacaataaattttatttgtttttcaaaatttcttttgtaagtttgcagtgtcgcaattaaaaaagacatcctatggagatcgaaaaaatcatccgcatgctggccgtattcatcgtcgtggccgccttcgcgctctcggtagccgcccggcttctgttccccgaagtttcgcacctgtccgacacgccgctgctgatactgctgatcctctcggtctgcgccatctggcgcgacgccctgcgctccgaaaagcaaaacgaaaacacaaacgaataatcccatgaaaaaactccttctgttcgccgcagcggcggccgttctcgcctcctgcgcacccaagacggcccctgagctgccgatggaaaccttcttccgcaattcggagaagaccggttaccagatatcgcccgacggccgctatttctcctacatggcgccttacgaaagccgccgcaacatcttcgtacagcccgtggacggcaagcaggcggtgcgcatcacctcggagaccgagcgcgatctggccggatacttctgggccggcgacaaccgcatcctctacctgaaggacacgggcggcgacgagaactaccagctttacggcgtgaacatcgacggcagcgacccgaaggcctacaccgccattccgggcgtccgcacgcagatcattgacccgctggaagagatcgactcgctgataatcatcggcaccaaccagcgcaatccgatgatcttcgacccctaccggctgaacctcaacacgggcgagatgacgatgctgtgcgagaatcccggcgacattcagggctggcagaccgaccacaacggccgcctgcgcgtggcttacgccatcgtggacggcgtcaattcgcagatccgctaccgcgaaaccgaagccgagcctttccgccccgtgctgacgaccaacttcaaggagagcgtctcgttcgccgccttcacccccgacaacaagcaggtctacgccgtcaccaacctcggacgcgacaaggtcgccctcgtgctgatggaccccgcgacgtgcgaggagatcgaacagctctacgtaaacgacaaatacgacttggacaacatctggtacagcgacgcgcagaagaaactgctcggcgtctcctacaccggccacaaaggcaccgcgcgccacttcttcgacaaggcgacgggcgagatgttcggccgcatggagaagcacctgcgcggctatgccatcggcatcgccggctcgaacaaggccgaggacaaatacatcgtctatgcaggcggcgaccgcacgatgggcacctattacctctacgacgtcgaggccgacacgatgaccaagctggccgacctcgcgccgtggatcgaagaggagcagatggccgagatgatccctatcaactacacttcgcgcgacggtctggagatcgagggctacctgacgctgcccgtgggcaagaccgtgcacaacgccaagaacctgcccgtggtcgtgaatccccacggcggaccttgggcccgcgactactggggcttcaaccccgaagcgcagttcctcgccaaccgcggctacgccgtgctgcagatgaacttccgcggttcgacgggcttcggacgcaaattcaccgaaatcgcctacggcaagtggggccagaccatgcaggacgacatcacggacggcgtgaactggctgatcggcaaaggcatcgccgatcccgcgaagatcgccatctacggcggcagttacggcggctacgccacgctgcagggcatcgtgaaggatcccgacctctacgcctgcgccatcgactacgtaggtgtgtcgaacctcttctcgttcctcgaaaccattccgccctactggaaaccgatgctcgacatgatgtacgagatggtcggcaaccccgaaaaggacgccgagatgctgcgcgagaattcgccggccctcaacgccgagcgcatcaagaccccgctgctggtggtgcagggcgccaacgacccccgcgtgaacatcaacgagagcaaccagatggtcgaagcgctgcgcagccgcggcgtgcatgtggactacatggtcaaggacaacgaaggccacggcttccacaacgaggagaaccgtttcgacttctaccgcgcgatggagaagttcctcgccaaatacctcaagggcgtcgaaccgcagggcgggatcgtgccggagagcgaccgcagataaaccggaatcacaaccagccacaagcatactaccataccgttttttaaagtaaaaagttcaaattcatagttgtgagaagggaggcccggaaatttccgggcctccgttttcatgcgagcccggcacccgttttgatttgcggacggcatgtattacctttgcactccgtgagcaccattccctacatagcgccgcctgcggacggattgccgatgccccgccgcttgtgggccattctggccgtggcgttcggcgtcggactgtcggtgcttgacagcgccatcgccaacgtcgccctgccgaccatcgggcaggagctggggatttcgtccgccgactcgatctggatcgtcaacgcctaccagctggccatcatggtctcgctgctgtcgttctcggcgctgggcgagctggtcggctaccgcaaggtctacatcggcgggctgatgctcttcacggtggcttcggtgggctgcgcactctcctcgtcgctcgccacgctggtgctggcgcgcgtcatgcagggcttcggcgccgcggccgtcacgtcggtcaacaccacgctcatccgcatcatctaccccaaggcgcagctgggccgcgggctgggtctcaacgccacggtcgtcgccgtgtcgtcggtcgcaggcccgaccatcgccgcaggcatcctttcgatcgcccactggccgtggctcttcgccgtgaacattcccgtcgggcttgtcgccctgtcgctgagccgccgcttcctgcccgacaaccccgtgcgggtcggcacccaccgcttcgactggcgcgacgccgtgatgaacgcactcacgttcgggctgctgatggcttcggtcgagggattctcgcacggtctcgatccgcgcatcctctcggccggcatcgccgcactgctcgtcgtcggcttcttcttcatccgcagccagctgcgcgaaccctatccgctgctgccgttcgacctgctgcgcatcccgatcttttcggtctcggtcttaacgtcgatctgctcgtttctggggcagatgctcgccatggtggccctgcccttctacctgcagcacgaattcggctacgacgaagtagccacgggactgctgatgaccgcatggcccgccgtgatcatggtcgtggccccgatcgccggcctcctcgtcgaacgtgtccacgccggatttctgggcggcatgggacttacggccatggccgcgggactgttcctgctggccttcctgcccgatgatccggcgcctttcgacatcgcatggcggctggtgctctgcggcgcgggattcggactgttccagtcgcccaacaacagcatactgatcgcctcggccccgccccagcgcagcggaagcgccagcggcatgctcgccacggcgcgtctggtgggccagatcacgggcgccgcgctgatggccctcctgttccacatcgtccccgaaaacagtacccatacggcgctcctgctcgcgggaggcttcgccctgacgggcgccgtcgtcagcatcacccgcatccggctgccgctgcccgaaggactaacccggcgcagaaaataaccggaagcatctccgaccgaaaccccgaagaaccgaaacaaacatccctctacaccccgaatacagatccgacatgaaatatccgttcctgctcgccgccctcctgctctgctctgcaaacctcgccgcccgccactccgatacggacacccttctacagcccgacaccctttccctccggcaatccgacgcgctctccgcccagaaatccgacgcgcctttcgtccgcccgccctacctgcggccgggtgacaccataggcatcgtcaccccggcgcgcaaactcaaggagaaggccgacacggccaaagtccgggaacgcttcgaagagtgggggctgaaagtgaaattcggagcgcactacgccgaccgcgaacagccctacttcgccgggaccgacgcccggcgcgccgcagacctgcaggccatgatcgacgatcccggcgtgaaagccgtcgtcagctatcagggcggctacggatcggtgcgcctgctcccgctgctcgacctcacgccgctgcgcgaacagcccaaatggatcgtcggcttcagcgacgtcaccatgctccacatggcgctggggcggttgggcgtcgaaagccttcacgccacgatgccgggcaagttccgcttcggcgccgatgaaaaacccgaagcgatcgtctcggacgaatcgttgcgcagcgcgcttttcggccgctggacgcgcatcgacgccgccgcacacccgctcaacgtctccggcacggcccgcggacggctcgcgggcggcaacctctcgctgctctgctcggcgatcggcacgcccgaacagcccgacttcgacaccccgacggtgctgttcatcgaagagatcggcgaacagatgtaccggctcgaccgcatgatgcagcagctggagcggagcggaatactggccaaatgcaaggccgttctcgtggggcattttacggacatgctgggacagaagcacttcggcgtctgggacccctgcgacatcatcgcagcctatgtccgtccgctggggattccggtcgtcttcggcatccccgcaggccacgaagaccccaacgtcgccctctacatgggccgcgaggtcgccgtcacggtcaacgatgcgggcgcaagcgtcgaattctgaccgcaggcccgccccgccggacatttacccccgtccgcaccctccgcagaagcctttccgcaaaaaatagccgccgcagggcgcgggcttgtcatatttttactatttttgtaagaggtggagaatgtgccgccgcacaagccctgcgccgacgggccgcaggcgccgcaaacggaatgcaaattaaaacgccatactatgttttcagctaagacctacgctgcgcgccgcaacatgctgcgtacgaagatcggctcagggatcatcctgctgccgggcaactccctttcgcccaacaactatccgaacaacgcctactatttccggcaggattcgtcgttccgctactacttcgggctgaacaccccgtcgctggcgggcctgatcgacgccgacacgggcgaagaggcgctgtacggcgacgatttcacggtcgaggacatcatctggaccggtccgcagcccacgctgcgcgaactgggcgccgaagtcggcgtcacggcgacgttccccatggccgaacttgaaaagcggctccgcaaagccgtttcgctgggccgcaagatccactacctgccgccctaccgcggcgagacgaagctccagctgtcggcgctgctcggcatcaagcccgaactgctgcacgactacaagtcggtcgaactgatgttcgccgtggccgaaatgcgcgagaagaagagcgccgaggaggtcgaggcgatggaacgcgcgttcctgataggctaccatatgcacacgctggcgatgcatatgtgccaccccggtgtgatcgagcgcgagattgcgggcgccatcgagggcatcgccaaatccagcggttcgggcctgtcattcccctcgatcgtctcgcagcacggcgagacgctccacaacctcaacgccgacggcgtattggagcaggggcggctgctgttgtgcgacgcaggctgcgagaccgtggacggctactgctcggaccacacgcgcacctaccccgtcagcggccggttcacgcagaagcagaaggagatttacaacgtcgtactggcggcacacgaccatgtggcgcgcatcgtcaagccgcatatgatgtacaccgagatacacaacgccgcctacatgacgctggccgaagggctggtggcgctgggactgctcaagggcacggccgccgacgccgtggcttcgggtgccatgacgatgctcatgccccacggactgggacacgggctgggcatggacgtacacgactgcgaggcgatgggcgagcggagtttcgacttctcgacgatcgccgaccgcgccgccaagtcgggaacctgcatctaccgcgcggcgtggcgcatcgaaccgggaacggtgatgaccgacgaaccgggactctacttcatcccggcgctgatcgacaagtgccgcgccgagggtctctacaagggcatcgtcgattacgacgcgctggaggcgtaccgcgacttcggcggcatccgcatcgaggacgacattctggtcaccgaagagggcagccgcatgctgggcgacaggaaaattccgatcacggtcgaggaactcgaagccgcagtaggccggtaacgtgaagcggattttcattttccccaccatcgaggaggccaaggcgttcatcctcacccagccccgcgatccggtcttcgtggccggagtcggcgcagcggagatcgcggccgcgacgatccgggccgtgaaagcccgcaagccccagctggtcgtgctcgcaggcatcgcgggggcgtacgaccggagcctgcagcgcggcgaggtggtcgaagtggtcaccgagcggatcgccgggattccggaacgttacgcccgcgaatacgaaacttcgggacccgatctgggactgcccctcgcggcgggcgttacggtaaaccgttcgggagacggcctgcgggagacgggccgggagcaggagttccgggagcaggagttccgggagcaggagttccgggagcaggagcaggaattccgggaaacagggttcgagattccggagccggaaacgaagtccggcgacgcagtttcggccccggccggacaggcgctgcaaccggctggagagagggcggacagcccggaacagacctcggacatgcagtcctcgatcgaaaaaacgagcggcacggacgggcaaaacgcgctgcctgtgatcggcgacacgaatgacacggacggacaaggctcgctgcccggaatcgacagcacggacgggcaaagcgcgctgcccgaaatcgaaaacatggagggcgcggcctttttcgccgtgtgcgaagcgctgggcgtcgcctgctgccagattcgcgccgtgtcgaactatgtcggcgaacccttcgaccgatgggccggagggctggccgtcgaaaaccttaccgcaacattaacccaaatattcggaaacgatgaataaaaaatggacactttgggcgggactgatcctgatactggtcgtcttcattctgatctggcagttcgcccctgccatccagcgctggctggccaacgtatttatcgacatcatcgtcctcgcgctgaccttcgcggcgggctggctgctgggccgctacggcggcaggcgcaaccgcaaccgcgatcaggagaacgcgcgcaacatcaccgaagcgcagaaacggtgacgctccgcctgcgcatatcgccctgcccgaacgacaccttcatgttcgacgcgctcctgaacggacgcatcgacacgggcggattgcatttcgacgtcgaataccgcgacatcgaggcgctcaaccgcggggtgcaggccggagatgccgacgtgagcaagataagctgcgccgtgctgcccgccgttgcggaccgttacgcgctgctggacagcggcgcggcgctcggacgcggcaacggaccactgctggtgcgccgcgcgggggaccggtcgccgatccgccgcgtggccgtaccgggagtccacaccacggccaacgcactgatgatgcgccttttcccccggattacggagcgcacgcccctgctcttctcgcagatcgccgccgccgtggagcggggcgatttcgacgccggagtgctgatccacgaggggcgtttcgtctaccggcagcggcagttggagctggtcgccgacctcggacagctatgggagcagaccaccgcgctgcccctgccgctgggcggcatcgcggccaaacggagcctgcccgaagcggtgcggcggcaggtcgagaccctcatccgccaaagcatcgaatacgccttcgcgcaccccgaagcgtcgcgcgcatatatcaaggaacacgcgcaggaactcgacgacgccgtgatcgacgcgcacatcgcacttttcgtcaacgactattcgctctcgctgggcgacgagggccgccgggccgtcgaagcgctgacggggattgcctgcgcttttaactcctgaccgacgaaaatgtaccgcacgaccaacctccccaacacccgcatcgaagtggcggacgccctgcgcggcatcgccgtggcgggcatcatcctgttccacgcccgcgagcatttcaacctctactggagcgggctggattacctccgcgccggattcggcggctgggagcaaaccgtggccggcgcgctgggattcctgctttcgggcaagatgtacgccatcttcgcactgctgttcggactgagtttcttcatccagagcgacaatcaggcccagcggggcaacgacttctcgctgcggttcgcatggcgcatggtgctgctgttcataatcgggctggtcaacgccgcgatctacaacggcgacgtgctgacctattacgccgttttcgggctgctgatgatccccatcggcaaactcccgaaccgctgggtgtgggtcatagcggcgctgctcttcatccagccgctcgaactctaccagcacttcagcggccatacgctctcgctgcgcggcatcgaaggcatggagaccctctatccgaccctcgccacgggaaccttcgcccagagcgcccgcgcaagcctcgcctacgggccgatcagctcgttcgcatggggattggaacacggccgcgccacgcagacgctgctgatgttcgtgctgggcatgctggcgggccgttaccggctcttctacgacgaaggccgcaaccggcgcatctggggcgggttgctggctgccggtattctcggcacatggctcgtgccgttcgaggcgatgcgcaacctgatgacggcgacggccatcgtcgcggctgtagtcctgctgtggtacagccggccgggattccggcgggcgctgcacggcatgaccttcttcggccgcatgagcctgaccaactacctgctgcaatcgctgctcggaacggcgctcttctacaactggggcatggggctttaccgccacgtggacgtgatctacggcacactcgcgggcgtgggcatcatcctcgtacagtacgccttctgccggatatggctgcgccgccattcgcacggtcccgtcgagtggctctggaaaaagctcacgtggctcgacattccttttttagaccgaaaaatcgcctcctgagggcgattttttcatgccccggtttggttatcccgttttttttgtatatttatagtcggctaaccggaaaatcccggaaagggcggcttccgcaaccgggaatacgccccgcgggaacacctccggcgacgccccgaaccacccgaaaaccttaaaaccacacgggaatatgaaaaattattcagctaaagagatcaagaacatcgtactcatcggcgcgcccggcacggggaaaactacccttgccgaagcgatggccttcgagggtaaggtcatcgaccgcaggggtagtatcgagacgaacaacacgctctcggacaacacggatatcgagcatgaatacaagcgctcgatctattcgaccatcctcttcaccgaattcatggaccgcaagttgaacatcatcgactgccccggctcggacgacttctgcggaagtctcttctcggcgttcaaggtgggcgacgtgggcgtattcctgttcaacgcccagaacggctgggaggtcggcagcgaaattcaggcccgctacgcccgtctgctgcagaaacccgtgatcggcgtagtgaaccagctcgacgccgacaaggccaatttcgaggccgccgtcgagtcgatccgcgcctcgtcgcgcgtgaagcccgtcatcgtgcagtacccggtcaatcagggtcccgaattcaacgccttcatcgacgtactgctgatgaagatgtaccgtttcaaggacaacgacggccaccgcgaggagctggaaattcccgccgaagagctggacaaggctcaggagctgaacaaggagctggtcgagatggccgccgaacacgacgaagccctcatggagctgtacttcgacaagggcacgctcacgcaggacgacatccgcgcgggtctgaaaatcggcctctcgaaacgcgaggtgatgccgatcttctgcaccagcggcaagcgcgacatcggcaccaagcgtctgatggagttcatcatcaacgtcgctcccggcccgctgaaggccccgaacttcctctcgaccgacggcgaagagatcgcggccgacgagacggcgcccgccgtggctttcgtattcaagagtcaggtcgaacagcatatcggcgagatcacctatttccgcgtgatccgcggccgtatcgccgagggcaccgagctggtgaacacccgcacgggcaacaaggagaaggtgtcgcagctcttcgccgtagcgggcaggaaccgcatcaaagtcaccgaactcatggcgggcgacatcggttgcaccgtcaaactcaagggcacgcgcaccaacgacacgctcgcggcgccgtcggcgccggtgaccgtcgaaccgatcgtattccccgaaccgcgctaccgcgccgccgtcaaggccaaggagcagggcgacgaggagaagctgggcaaggtgctcaacgacgccaaattcgaggacccgacgattctggtcgaatactccaaggagctgaaacaaaccatcatacagggtcagggcgagcatcatctcaatatcctccgcacgcgcatcgaaaaggagaatcgcctccagtacgactatatcgcgccgaagattccctaccgcgagaccatcaccaaggtggcgcaggccgactaccgccacaaaaagcagtcgggcggcgcaggccagttcggcgaagtgcacatgatcatcgagccttactacgagggcatgcccgaacccaagaactacaaggttccgggcaagggcgacatggtcgtcaaccccaagaccaaggaggaatacgacctgccgtggggcggcaaactgcagttctactcggcgatcgtgggcggcgccatcgacgcgcgcttcatgcccgccatcctcaagggcatcatggagaagatggacgaaggcccgctgacgggttcctacgcccgcgacatccgcgtagtgatctacgacggcaagatgcacccggtggattcgaacgaaatctcattcaagctggcggcgcgcaacgccttcaaggaggcattccgcaacgcgggacccaagatcatggagccgatctacaacgtcgaggtcctcgtgccgagcgactacatgggcgccgtgatgtcggacctccagaaccgccgcgcgatgatcgccggcatggagtccgacaagggcttcgaccgcctgaacgccacggttccgctggccgagctgtaccgttattcgacgaccctttcgtcgctcacgtcgggatcggcgacctactcgatgaaattctcctcctacgagcaggttccggccgacgtgcaggacaagctgctgaaggcctacaccgacaccgacgaggagtaggccccggccgaagagaaagggcaggacaaacggttccggccgacgtgcaggacaagctgctgaaggcctacaccgacaccgacgaggagtaggccccggccgaagagaaagggcaggacaaacggttccggccgaaaagagcgggcaggaccgaggggtcctgcccttttttcatggaacgacgcgccgggacggcattttctccggctgttatccgaatgcaacgcagaaacacggcagaaaaatccggcatgaggaaagcacggcgcccgctcattcatccggttctgcgttggagcgtcaattctaccgccgcatccgcgaaactccatgttaaattaatgttaatattcggcggcaaaaccgtttcatcgggaaaaatggcgtaaatttgttcacaatttgcactaaaccctaacatgagtgaaatctacactgtcattgtaggcattctgggcattctcgccatatccggtctttttgtcggcgtcaccaacgacgcagtcaatttcctcaactccgccatcggctccaaagccgcacccatgcgcaccatcctgctcgtcgcctcgatcggcatcatcatcggcgtagtaacgtcgagcggcatgatggaggtcgcccgcagcggcatgttcaatcccggacttttcaccttccacgaagtgatgatgctctatctgggcgtgatgttcgccaacatcatcctgctggacctctacaattcgtggggactgcctacctcgaccaccgtatcgctgatcttctgcctgctcggatcggccatcgccgtgtcgatctacaaaatctcaaacacccccgacctcggcgtcggcgcgctgggacagttcatcaacacctcccgcgccatgggcatcgtctcggcgatcctcctgtcggtggtcatcgccttcacctgcggaactttcgtcatgtacgtctcgcgcacgatcttctcgttccgctacacgcttccgttccgccgcttcgggtcgatgtggtgcggcgcctcgctgacggcgatcgtctacttcgccgtcttcaaagggcttaaatccattctggcgggacacgatttcgtcacgatggtggacaatcacctgctgctgtcgctcctgatctgctgggtcgtctgctcgctgctgctcttcttcatacagcggttcaagatcaacatcctgcgcatcacgatcctttcgggcacctttgccttggcgctggccttcgcgggcaacgacttggtgaacttcatcggcgtacccgtcgccggattcgacgcctactcgatcgcccggcacagcggcgattcccaaatgctgatgggcgtgctgaacgacaacgttccggccaacttcctgatcctgctggccgcgggcgccatcatgatactcacgctctggacctcgaaaaaggccatgcacgtcaccgaaaccgagctgtcgctctcggcgcagggcgacgaaggcaccgagcagtacggttcgtcggtcctctcgcgcacgatcgtccgcgcggcactcaacatcaacgccggcatcgaacgggtcatcccgccgcgcgtgcgggccgccatttcgcgccgcttcgaatacgaggacatcgaacacagcggcgcgccgtacgacatgatccgcgccacggtaaacctcacgacctcggccatgttgatcgccatcgccacgtcgctcaaactgcccctctcgacgacttacgtctgcttcatggtggccatgggttcgtcgctcgccgaccgcgcatggggccgcgaaagcgccgtataccgcatttcgggcgtcatgaccgtcgtcgccggctggttcatcacggcgctgggcggattcctgatcgcattcgtcgtggggctggccctgatctacggcggaaccgtcgcattcgtcatcgtcaccctcttgtgcggctacatgctcatccacagcaacttcctgaaaaaaggcaaatccgcctcccccacggcggccaacgccgacacgcgcaccaacgaggacatcatcgccaacctgcgcgaagaggtctgccacacgatggagtgcgccacgaagatttacgaccgcacgctgatcgccgtcttcaaggagaaccgcaaggtgctgcgcgacatggtcaaggagtcgaacgacctcttctaccagtcgcgcgaacgcaaatacacgctgctgcccacgctcaagaagttgcagagcggcgacgtgaacacggcccactactacgtgcaggtggtggattacctcaacgaaatgaccaaggcgctgatgcacatcacgcgccctgcgttcgaacatatcgacaacaaccacgaaggactgtcgaaggagcaggccaaggacctgatgtcgatcaacgacgatgtggagtcgatctaccgtcacatcaaccagatgctgcgcgacggcgacttcacggagatcgagatggtgctggcgctgcgcgaccagctgttcgagtcgatcgccgaggccatcaaatcggagcttgggcgcatcaacgaagcccggtccaacaccaaggcgtcgatgctctacctgacgatcctgaccgagaccaagaacatggtgctgcagtcgcgcaacctcctgaaatcgcagcagtactttctcaaacaccgtgcgggcgcgccgcagcggtggatcaaaccgaccaaataagcgcggatcagcatggacatagcacaagccaaacgccgggaaaacatcgccgaatacatcctctacctctggcagctggaggacctgctgcgggcgctgcaattcagccccgaagcgatcttctcgacgctcatagccccccgcaaggacatcgccgacgagcagaagcacgtattcctgctctggtacatggacatcgccaacctgctgcatcaggagggcaaagacgaaaaagggcatctggaacatacgctccacctgatcggcgacctgcacgatttgcacctgcagctgatgaagctccccgtcggcgagcactaccgcaggacatacgcccgtctcgaacccgaactgccgcgcctgcgcgccgtgctgggcaatccgggcatgaacgacacggagttgtgcttcagggccttgtacgccgccatgctctatcgcatcaagggcgagggcgaaaagtcggccgtcgccgacacgctcgaattcatctctccggtaatcgccgagctggccgacatgcacggcaaggtcgagcgcggcgaagtcgatctgttcaagacggccgagggcaaataacggccgactttcccgcggctgccgtatgtcgccatggcgacatacggcgaccgggaaacaagcaccggcaccgatcttaaaaaaggatgtcttttcagacatccttttatatcatccggcgaaaagcccccctctccgacacatacggagcggctattcgatctccagccccatgatgtaatcgttcatgtaatagccgtcgccgatcgggaaatcgccttcgcggagcttgcgcatgcccatcttctcgtaaaaacgcactgcacggttgctgcggtttacgttcagctccatcctgcagggcgcgggatgcaccgaacgaacatattccacagcatggcggaacaggaattccccgacgccgagaccctgaaaacggggcagcacgtagattttctgcaaatggaacaactcttcggcctcctgctgcaccgaaaggtacccgcacggttcgccgtcggacgaggcgatgaaccacgcaaccccggtgcgcatctcacgccgcaagacttcgggcgcatacatccacttcatcatgtaatccatttgcgacgaggtgataatttcgcggtaagtcgccggaaacacctcgtcggccagactgcggatcagtccgcagtcggtctccacagctcgtctgatagtaagcatcttcaacggttttacggtttgcgccgcccgcagtttcccgcggagagaccccgcaacgagtttccggcatcaggccggcggccggcggtaaagataaacaaaaaaagccgactttgcgtcggctttcactctttcctaacggggaactaagcgtacttgaacgtcgattcgtccgatacggtcagcttcttgcgacctttcgcgcgacgtgcagccagcaccttacggccgttcgccgtctccatacgactgcggaaaccgtgcttgttgattcttttccggcgcgagggctggtaagttctcttcattgccatagctatatactttttattgtttcagacatttttacggattgcaaaagtacaacaaaaaagttatccgcaaaaatttttcacgaaaataattcaaaaaagccgggcaaaaagcacgaaatctttttaactttgtcaagaagaggagggacgaaagcccgccgacggcacatcctgcggctgcgccgccgggagcggaatccggcgggaaacacggtcccgcagttaattatcacgcatatggcaattttcaaagtcgaaggaggccaccgccttcacggtagcattacgccccaaggcgccaaaaacgaggcgttgcagatactctgcgccacgctgctgactcccgaacgggtcacggtgcacaatatcccccggattctggacgtcatgcagctcatcgagctgctgcgccgcatgggcgtcgaggtcgaacagctcgccgaagacacctacagcttctgcgccaaggagatcgacttcgaatatctgcgcacggaggactaccgccggcgctgcacgcgcctgcggggttcggtgatgctcatcggcccgatgctggcccgcttcggcgtgggctacatccccaagccgggcggcgacaagatcggccgccgcaggctcgacacccacttcatcggattccagaagctcggcgcgaaattcaacttcgacatcgccgacgagttcttcatggtcgaaggcaaagagctgaagggcacctacatgctgctggacgaggcttcggtgacgggtaccgccaacatcgttatggccgcagtcttggccaaaggctcgacgacgatctacaacgccgcctgcgaaccctacctgcagcagttgtgcaagatgctcaaccgcatgggagcgcgcatttcgggcatagcgtcgaacctgctgaccatcgagggcgtcgattcgctcggaggcacggagcacacgctgctgcccgacatgatcgaggtgggcagtttcatcggcatggccgccatgaaccagtcggagctgaccgtcaagaacgtctcgttcgagaacctcggcatcatcccggcgcagttcgcccgcatgggcatccgcttcgaacagcagggcgacgacatccatattccccggcaggaccactactcgatcgagaccttcctcgacggctcgatcatgaacatcgccgacgccccgtggccgggactcacgcccgacctgctgtcgatcttcctcgtggtggcgacgcaggccaagggcgccgtgctgattcaccagaagatgttcgaaagccgtctgttcttcgtcgacaaactgatcgacatgggggcgcagatcatcctctgcgacccgcaccgcgccacggtcatcggccacgaccaccgcatacgcctgcgcgcgacgcgcatgacttcgcccgacatccgcgcgggcgtggcgctgctgatcgccgccatgtcggccgagggggtctcgacgatccagaacatcgaccagatcgaccgcggctaccgcgacatcgacggccgcctgaacgccctcggcgcccgcatcacccgcctcgacgagtgcgaataacaaaccgaaacaaacgatactctgatttatgttcttggaaaacgccagccgcaaaggctggatcgaagtaatctgcggctcgatgttctcaggcaagaccgaagagctgatacgccgtctcaaacgcgccaaattcgccaaccagaaggttgaaatcttcaaaccccgcatcgacgtgcgctattcggaagaggaggtcgtctcgcacgacgccaacgccatccgctccacgccggtcgactcggcccggaacatcctgctgatgacctccgacgtcgatatcgtgggcatcgacgaggcgcaattcttcgacgacggcatcatcgaggtctgccgcgagctggccgacagcggcgtgcgggtcatcgtcgcgggactcgacatggactacaccggcaagcccttcggcccgatgccggcgctgatggccacggccgaatacgtcaccaaggtccacgccatctgcgtccgctgcggcaacctcgcgcaccattcgcaccgccttacgcaagacgaaaagctggtcatgctgggcgaaaccgactcctacgaggcgatctgccgccactgcttcaaggagctggtccgaaaccggaaagagaccgaatagccgcacaagccccgccggcaaagagacacccgcgcatggaagaactgaagttagccaaccacaacaccacgctcgtagacagcgtcgaggagagtctgatctcctacttcaaggaacagggtctgcgccccggatgcagcattccgaacgagatggaactcgcggcgtcgctgggcgtcggccgggccgtactgcgcgaagcgctgagccgcttcaagatgaccggcatgatcgtctcgcgcaccaagaaaggcatggtgctgggcgagccgtcgctgctcggcggcatgaagcggtgcatcaatccgctgctgatgaacgaatcgacgctctgcgacatcctcgaattccgcgtggcgctcgaaatcggcatcagcgacaacatcttccgcaacctcaccgacgccgacgtcgccgaactgaaggagatcgtcgagatgagtcaggtcatcggcaacaataaatacgccccggtcagcgaacaccgtttccacaccaaactctatgaaatcacgggaaacaagatcatcaccgaatttcaggacatcatctatcccgtgctggatttcgtcaaggagaagtaccgcgactttctggaaccgatcgaaaaggagctggagcgggccggtgcgctggtgacgcaccgcgacctgctgaaatacatcgaaaaccgcgacctgaaagggtacaaaaaggcgatcgaagagcatttcaggctctattcgatctatctggaacgccacaagaaatagcgccggagatcatgcggccggaggggcggagcctgcgacgtctccgtccctgtaatgccgtcacccgccgtcaccccctgcgacgcctcagctcctgccgttcgtcatcgggccgcgcgcagcgccccgatgaatccgggccagagacaccataggttttcggtctgcaaccacaattcgcgggcctgcgcccgaagcgaagggcgttcgctctcgatatcgcgcaggtaagtctcgtcggcgggatgctcctcggccgtaaattcggcgaaatagggcgcaaagcgggttttgaagcgctgcaactccccttcgggcagcttcccgccgcggcggaacgccgaccatagcagcaggatttcgcggctggcatacttgtccgacacgtcgttgatcacctcgtcgaacaactcctgctcgtccatggccagataatcgaaagccagcagttcactcccctccagatggtcttcggggtccagttcgagcagcaattcgagcagtgccgccgacatttcgaagtcgttgatcagaaaatggtcgatggccgacgcccgaatcagttcgagggccgcgcgcgaattgcggtggttccattcgagattcacctcctcgtcctccggcaccagctcggcaaaacgctgaaaggcctgaaaccgctcgttgcaggcttcctcgacatttccggcacgctccatttcgcgggtacgggccagtactttggcaaaattatagggtccctcgccgattacctcgtaggtctggtcggcagtcgggttaaggcagggattttgcatcgcgccgcattttaaaaattagaattatcaacaatacgagtgtcaccgccccgcccagcaggtaggccgccgcacggtcgcgcatgccgcacatgagcggagagacgaagacataggacgagcatacgtaggtcatgaccgtcgccggaatcagccccacccagcggttgcggccgtgccggttcaggaaagccgtaatcatccacaacgtgaccatcgccagcgtctggttcatccacgcgaaatagctccacattgtctgaaaaggcagacagaatatgattacgagacctgcagcgaagagcggaacgctgatgcagatgcgtttgcgcaggctccgctgctcgacgcccataaagtcggcgacgatcagccgcgccgagcggaaggccgtgtcgcccgaagtgatcgcgcaggccacgactccgaaaatcacgaacccggccagcacctcgcccagcgtgtcgcgggcgatcgcgtcgaccatcacggccgcctgtccgccgtattcggcgatcgcggcgttcagccctccgacgccgttccagaacgccatggcgacagccgcccagatcagggcgatgatgctctcggagatcatggcgccgtaaaacacgggccgggcctgacgctcggagccaagacagcgggccatcagcggcgactgcgtggcgtgaaatcccgaaatcgcgccgcaggcgatggtcgtaaagagcatcggcacgatcggaaaccgcgccgcatcggcgatctggttccggaaagaggtgaattcgggaatcgtatatttcccgctgaaaagcagtaccgcaaggattcccagcgccatgaaaagcagcgcacagccgaaaaccggatagatgcgtccgataatcttatcgacgggcagcagggtcgccacgatataataaacgagaatgacgcccagaacgatcagcagcagccacgagaaatcgccgaagacgattcccgaaagcgccggagcgtcgatgcggttggcgatcagcgaagcgggctgcgagaggaacaccgcgcccacgagcaccatcaatccgacagaaaagacgcgcatcagctgtttgacgccgttgcccagataggtgccgaccgtctccggaaggctcgcgccgttattgcgcagggagatcatgccggcgataaagtcatgggccgcgcccatgaaaatcccgccgaacgtaatccagagaaacgccacgggaccgtaggccgcgcccagcacggcgccgaaaatcggccccagaccggcgatattgagcagttggacgaggaaagtcttccacatcggcatcggaatatagtccacgccgtcgaacgacacggccgaaggcacgggacgccctgcatcggccccgcaaagacgctccagataacgtccgtatgtaaaatacgccgccaccagcagcgcaaggcacaccagaaaagtgatcattatcgggttagttttgcacgaatatagtaagaaatgtgagaatttttgaaaaattgttgtttgaaaaaaatatttttcagatatttgcagtcccaaagggaacttaatgttcccggcaagccgaaatagctcagttggtagagcgtttcactcgtaatgaagaggtcccgggttcaagtcccggtttcggctcaagccaccgcaaaagcggtggcttttttttatcggagaagtcccgcccaaagcgccgaaatgcaccggcagcgaaatatctgcaaataaatgcagatattccgattataatgcctatctttggcaacccggacaatcgagttcatattgtaactttcttggcaatacactgtcccgcttatctttagcaggtcttctccatcgctgattcagccttcaaaaccgactttttttgttcgaataccgactcgctccagcaacagcgcggcacggagcatatccggcggcgtgcggcaacggcggcgaaagcctggaacaaacacattttaatcatataattaatggcgatttcattcagcaaaagagaattagagaagaaaaaacaaggcaagaagttagagaagcaacagcgcaaagaggaacgcaaagccaacaggggcggcagctcgctcgacgacatgatcgcgtatgtcgatgcgaacggcatgattaccgacacgccgcccgacatgagcagcaaaccgaaggtcgatgcggagaccatcgcggtattcgtccccaaaaaggaggagcaggagccggtcgcactgcggggacgcgtggaacatttcaacacagacaaaggctacggtttcatcaaggacctcgacagtacggagaaatatttcttccacatcagcaacgcaccggccgacatcgccgaaggcgcgctggtgaccttcgagacggaacgcggtcaacggggactcaatgcggtcaacatagcatacgcaaaataaacaagcatcatttcacataatcaaaagacagatgaacatttacgtttcaaaactgaacttccgcacgacaggcgagagtttgcaggcacttttcgcacaatacggagaggtatcttcggctaacatcatcacagaccgggagaccggacgttcgcgcggtttcggctttgtcgagatgcccgacgagggccaaggtcagagcgccatcgacgccctgaacggcaccgatttcgagggtatgacgatcatcgtaaacgtagcccgccccaagaccgaacacggcaacggcggcggttacggaggcaaccgcggcggcggtggctacaaccgcgacggttacggcaaaagacggttctaaaccgggaatataattccacaatccggccgcaggagtctgtttcgacaggttcctgcggctttttcgatgcccaaggccggcgaatcccggagcgtacggccaatcgcagagtgcatgaccggctatggagcacatggccgatcgcgggacacgaccggctgcagaccgggaaacaccggagatacgacagaaaacagacgaaggggcgcaggtctatgactacgcccctcgtccatatctgtaacgccaagtcattcggtccagccgccgcccaacgccttgtagagctgcaccagcgccagatgctcgtcgcgcacggagttgctcaggccgatctgggcgtcgaaatagcgccgctgggcgtccagcacgtcgatgtaattggtgcttccggcacggtattgcaggtgcgccagctcgacgtatttgctcgccgcatcgcgcagattcagcttcaaggccgccgttttgcgggcgctgcgataggtgatcacagcgtcgtcggcctccttgaagaccgtcaggactttctgctcgtaggccagacgcgcttcgtcgtaggccgccagcgcggcacggtagcgggcctgcttgcggccgaaaccgaagatcggcgaagcgagcgtcccggcgacatacgagaaaggcgaacggaaaaatccgctcagggcgtcgttttcgagaccgcctgtcagattgaacgtcaggcgcggaaaccggtcggcgtaggccatgcccgctgcagccatcgccgcacggagccgctgctcggaagaccggacgtcgggacggcgctgcaacagcccggagggcagtccgacgggcaggctgtcagcgaattcggcatcggtattcatcttgccgcgcaccacccgccggtcgggattttcacccatgagcagcaggatgccgttctccatgatcttgattttgcgttcgaggtccggaatcagcgcggccgtcgaggcgtactccaccttcgcctgctgatagaccatttcggaggtgagaccgccctcgaaccgcagctgcacctgatagagtccctcgctgcgcgtaatgagcgtacgccgcacgatcgacagctcgttatccagcgcgatgaggttgaagtaggccgcggcgacggacgccaccagcgtcatgcgcatcgcccgccggtcctcgaccgaagcgaggtattcggcgccccctttgcgtttggcccagcgcaggttgccccacaaatccagctcccagctgagcgtgactttggccccgaatccggggtcgcggctcgatttttcaccggcgtagtcgttggtctcgtagtcgccgtaagcggttcccgtgaccgacggcaggcgttcggcccggctcacccggtacagctcccgcaggcgctccacgcgcgcggcggcggcgagcatgtcccggttgttgtccagcgtgcgttcgatgatttggcagagggtcgaatcgccgtagaaccgccaccactgcacgtcggcaacggtcagggagtcggaatcctccccggcgatgcgctccggcagatcgacgtcgggcgccttgcagtgccgcacggccgagcaggagaccattccggccgctgcggccagcagaatgattatcgtaagtcgtttcatcgtttcagttttgctttgatcctgtaaatccacacgaagaagaagggcacgaagacaatgccgacggtaatggcgaccagcatgccgaagaagacgcccgtgccgatgccctgacggctggccgaacccggtcccgaagcgaagaccagcggcagcaggccgaggatgaaggccagcgaggtcatcacgatcgggcggaagcgcaggtgcgccgcggtaagggccgcagagacggcgtcgcgtcccttctcgatctcctccttggcgaactccacgatcaggatggcgttcttggccaccagccccacgagcatcaccagtccgatctggaaatagatgttgttctccagcccgcagatccagatgcccagataggcgccgatgccggccacgggaagcgacaggatgaccgccacgggcaccgaccagctttcgtactgtgcggcgaggaacaggaagacgaagaggaaggccagcgccagcaccagcccggtctgtccgcccacgtgcttctcctgataggagagtccgctccactcgacgccgaccgatgccgggaggtgcttgcggacaatgctctccagcacgtccatcgcctgccccgaactgtagccgtgggccgcttcgcccgaaatggtcgccgagttgaacatgttgaagcgcttgatgttgcccgcacccgtggtataatgcgtcgtgccgagcgccgtgatgggaatcatcaccccgcccgccccgcgcacgaagaagaggttcaggttgtcgcgctgggcgcggtagggagcctcggcctgaatgtaaacgcggtagatgcggttgaacatgttgaagtcattgacgtagatcgaccccgtaaaggccttcatcgtcgagaaaatgtccgacatcgagacgcccagcagctgcgccttgtcgcggtccacgtcgaaatagagctgcgggatatcgccctgcatcgacgacgagagccccgtgagttcgggccgctgcgcggcatagcgcatcagcgtatcgacggcgcgctgcagctcggcgtaggtcgtattgccgcgcgcttcgagcaccatctcgaaaccgcccgaattgcccagaccgggaatcacggccggacgcgacaggtagacccggctttcgggatagcgcgacatctcggcgcgcacgcgctgcatcacctcgctcaggccgtccgaatcgcggtcgccccacggtttgaggatcacggtcagctggctgcgcgcctgattggtgcccacgcggggactcgaacccgtcacgttgagcacgtactccacgtcgggatcgttcatcagaaactcgacggcccggtcggtcacctcgcgcgtacgctcgatagtcgccccttcggggagctccaactccacggtgaaatagccctgatcctcctgcggcatgaagctctggggcaccagacggttcatcagccagatgccgaccagcacgatgccgaaggcggccagcatgcgccgcgagtgcttcagcgccccccgaatcatccggccgtagaacctgttgcccgtcgccagtccgagattgatgcggcggaaaaaccggtttttcttctccccgctttcgggtttgaggaaaagcgaacacatcacggggctgagcgtcagcgccacgaccgtcgaaatgatcaccgaaacggcgatcgtaatggtgaactggcggtaaagctgtcccgtgattcccgcaaggaagctcaccgggacgaacacggcgcacaacacgagcgacatggcgatcagtgcgccgctcaggctgcccatcgccttcttcgtcgcttcgtaaggcgaaagatgctcctcgttcatgatgcggtccacgttctcgaccaccacgatggcgtcgtccaccacgatgccgatagcgagaatcagtcccagcagcgtcagcatgttgagcgagaagccgaagacgagcatcacgccgaaggtgccgatcagcgaaatggggaccgccacgatcgggatgagcgtcgcgcgccagctctgcagcgagaggaagaccaccagaatcaccagcagcagcgcttcgaaaagcgtccggtagacgtggtggatcgactcggaaatataggtggtcatgtcgaacggaatctcgtagctgattccctccgggaaattcgcacggatctcctccatgaccttcttgaccgaaccggcgacctccatggcgttggcaccgggaagcatgttgatattcaagacggcggcgttcccgccgttgataccgctctcggtgctgtaggaggaggcttcgagcgaaatgcgcgccacgtccttcagacggatgatcgaaccgtcgggattggcccgcacgacgatatcctcgaattcgctgaccgatgacaggcggccctgcgccgtgatcggaatcgtcacgtcgatgccgttcatgggggcctgccccagcacgccggccgccgattcgcggttctggtccttgagcgcgttctgcaaatccttgaccgtcaggccgaggtcggccagcttgtcgggcatgacccatatctgcatggcgtaatagcggctgccgacgttcgagacgctgcccacgccgggcacgcggcgcagcatgtccagcacgttgagcgtggcgtagttgctcaggtagatttcgtcgaacttggggtcggatgacagcagcgtgatggtcatcagcttgctggccgcctgcttctcgaccgagatgccgttctgcaccacctcggccggaagacgcgcttcggccttcttcaggcggttctggatgtccacggccgccagatcgggatcggtcgagatatcgaaggtcaccgtggcggaaaaaccgcccgaattggagcttgacgactccatgtagatcatgccgggcgtgtcgttcagctcctgctcgatgggcgtggccacggcctgcgtcacggtctgtgcgtcggcgcccggataggaggccgagatgcggaccacgggcggcacgatctgggggtactgatcgacgggcagcagggcgaggccgatgccgccgacgatcacgatgatgatggacagcaccgtcgaaaagacgggcctgtcgataaaaaagtccgctttcataggttactgctgattttcggtctcctcctcgcgccgcgtaacgaccggttcgactttcatgccgtgctggagcttgtggtatccctccacgacgatgtcttcgcccgacaccagtccgcgctcgacgacgatgttctgtccgatttcgggccccgtttcgatgaaacgcttctcgacaatgctgtcgggacgcaccacgaagatgtaggccccgcccttctcaatcaccacggccttcgacggcacgaccacggcgtcctcacgcacgtcgagcagcagccgcaccttggtgaactggcccggcaacaggatatggtcgggattggacatctcggcgcggacggagaaggtacccgtctggggatcgacctgcggatcggcgaaatcgaccagtccccggtaggggtattcggagccgtcggccagcgtcacggtgatataggggtcccatttacgggccgtatcgcggtgtccgagattgacgttgcgggctttgctgcgcaggtagtccagcgccgtcatgctgaaatcgacgcgcaccgtatcgctcttcaccaccgtcgccaacagcgatttgccgttcggtcccacgagcgtcccgatgtcggcgttgcgctcggagatataccccgcgatgggcgacttgacattggtatagcccagcgtcatttcggcctgcgtgaggtcggcctcgcccaccaccacgtcggccgcggcgctctcgtacgaagcgatggcgttgtccagttcgagctggctggccgcgctctgctggtagagcggacggatacggtcgaggtcgcgcttggccttgagggcctgcgcgcgcgccttgttgagctgcgccttggccttgtccacgcgcgcccggtagacgagcgggtcgatcacgaaaagcgtctggccttttttaatataggtgccttcggcgaagagcatcttttcgaggtagccctcgacgcgggcgcggatttcgacgaactgctgggcgcggatgcggcccacgtaatcgccgtaaatattgacgtcttccgtctcaacgggttcgacggccacgaccggaagcgtgaccgatgcaggccgcggccggagcagcaccacaagcagtacgcccgcgacgatcgcggcgcaggctatcgcaatccactgcctgcggctcagcttcacacggacacgggccgcacgcgaagctgccttcttcacgccggccagattcaggttctgcaaatcgggtttcaacttatcaaatttcatagagtgtttataaaatgagggtacagagcaatcgttcaatccttgcgccaagatgcacccgtatgtttaaaacatttattagcagcaaaataccgtccaaatgcggctcaaagatatgcaaaattgtgtagaattattccacacggctgtggaataattccacaacgcccgacccggagagcggcccgaaaatccctgcgcagaggccctgccgggcacattccggccgcggcggaacttcggccgcacctccggcgacaaaaaaaaggacccgccgggggtcctttcagattacatttcgggaggaagagactgccgcagcagcccttttcacggcttaccgacgggttcgaaccagactgccgtcatcggctacacggagggtctttgacgtctcccgaaggctcccccccctcacggtgctcccgatcctctgggagccggagtccgatgggatgggcgaagataaagcgggcgccgcccgtataggtcggatcgacccagatgcggccgccgaagatcatggcgatctgacggcagatggccagtcccagtccggtacccttcttcttgttgccgtcgagtttctcgaagcggttgaagatcatctcctgcttgtcgagcggaatgccgggaccggtgtcggtcaccgagaagagcacctcgttttgttcgggacagatctccaccccgagtacgatgctgccttcggaggtgaacttggccgcattggtcagcaggttgataagtatctgcgacaggcggtggacgtcggtagtgagcatgtacgaatcgacggcgcattcgagacgcccctcgacccccggctgacaggtatgggccgtggtcatgaggatatgctgacaaatctgcacgatctcctccgcagagtagttgaacctgatcttgccgcattcgagcgacgagatatcgaggatgtcgttcagcagcgtcaacagcatttcggaattgttgaccacgatggcgcagtattcggcgcgctcctcctgcgagagttcctcgccctgcatgagcgacgagaagccgacgatggcgttcagcggagtacgtatctcatggctcatattggccagaaaggccgatttgagcatatcggactcctcggctttctcgcgggcgatcaccagctggccttcgcgctcttcgagcgtgcgcttgagacgccgcgtacgcaggaacaggaacgccacgaagatcagcagcagcaccaacagtacgattccgcccacgagcaactcgatatagtgcgaatatttcgagagtttggcagccaccgtatcctcgataacgctgcccttcggcaaggcgtattcggcgatcttcagctccttgagcttgcgcgagtcgaagacatattcgccgtccgagaggtggaagtgcacaccgcccaagctgccggtcttatagtactccttgatctgggcggcgatgacgttggccccgttctcgtagttgggcacgaagccgcccacagccacgtcgccgatgcccgtgcgggtgaccgagaagaccggaagacgggggttgagctgcaccagatcgttgagcgaacgctgcatgaggtattcgccgtcgctgcccacgcgccacgtgcccagcatcacggccgaccggggagaaagcgacgcataggccgcatgcgaagcctcgtcgccgtcgcggctgtccaccagcacaagattcaggtcgggataattctccatctcctcacgcacgagcgcctgcagcgagatgccgccgtaggtgttgtccgagataaacgcgaggttctccacctcaggatagagcgtgcggatcagctcgatgttgcggcggatgtcgtatttgttgagcaggccgcccacattgtgcaggctgtccaccatattcatgtagttgatcgaccggggcatccagacatcggcgctgtcggacggcggcggaaacacgatgccgttcgaactgacaaagcagctgaagcacatcacctccttgggaatgcgtcccagcgagacgaacgacgcccacgcctcctgccccagcagcacgatggcccgcaggccccctttggattcataacgggttatcaggttgtcggtctgcgaaatccagaggggcgcgtcgttgatgctcttgcattcgagcgtctcgacgtaaatatcgcacggcacgcccgacgccacgacctgacgctcgaattccgtgatgaaactcgacatgcggcgcgtgtcgggattgtaggacgaaatgatcagaatgctctcccgtccgcgggcctcctcggcccgaagcagcgagggcagcagaatgcagcaactcaggagcagcagcgtccagtgttttatcacttgattaccggtcatagttttctcttttaccgcgaaagcagcgaagcgatacggctgcgaagctcgtccgcacgcagcggcttggcaaggcattcgttgaatccggcctgaaacatacgctgacgatcggtttcgaaagcataggccgtaagtgcgatgacgggaatgtcgggagcacgctcgcggataagccgcagcgcgtcataaccgtccatgacgggcatgttgatatccatcaataccagatcggggtgtacttcggcgaacatatcgacggcctgccggccgtcccatgcatgcaccagttcgtaatcacgacgcagcagcacttctaccagtttgaaattactcggattatcctcggcaacgagtaaccggggacggccgtcgtcggaatttacgcattcgttacactccatcgcttcatcggtttaacaaaaccgtccggatgcggaaagtccggacaattgcacaaaactaccattttttttgattaacaccatagtatttccggaaaaaattaatatcatcgcagtccgggagcatggaaatccgggcgtttttgcgttataaattacctcaaaagttcataatgacaaatatttttccgatatttgcaacgggaaaaaagtgactcatagcgaatatttactacatttactgtcgaaactcaggccagaccctccgcaggcggcccgcatgccccctgcggcacgcaccggaagcggagagacatagctgcgacacacccacggcaacgaacgaaccgacatgaacaagaaacaaatactgatcgtagacgacaaggagcagatcgccaaaattctttacgcatacctccaagcggattacgactgccattacgtgcagaatccgctgcacgccatcaaacggctgctcgccggccacatgccggacctgatcatctcggacatccgcatgcccgaaatgcgcggcgacgaatttctggaatacctcaaacacaacgaattgttcaagcagatcccggtcgtgatgctttcgagcgaggacagcacctcggaacgcatccgcctgctggaagagggcgcggaggactacatcgtcaaaccgttcaacccgcaggagctcaaaatacgcattaaaaagattctcgattgaaataccccgtcatctacatcaaaggcaaaggcagccacacggcccgcttctcggaaatggtcgaaggcaggatgtacgtcgtgggggacatcggctcggcgatgcgcacgctgacgtcgctcaggacggatcatgcgttcatcctctacgaacagcgcgacccggccgccgacctctccgatatccggctcctcaattcgtggccgggcgggggcatcgtgctcatcacctcgcgggaactgaccgaaagggaacgccgcgaatacctgcgcgcaggggtgaacagcgccattgcgggagacatgccgcggaaggatttcctgcgcacgctgcaattcatgggcgactacgccttcacgcacaaacccgcagcgcaaaacagccccgaagtgcagattttccgcatgccgctctggaaacgggccttcgacatcgcggcatcgctctcggcgatcctcctgctctcgccgctgctgatcgtcgtggcggcagccatcaaactcgacagccccggaccggtggtctacaaatcgaagcgcgtcggcagcaactaccggattttcgacttcctgaaattccgctcgatgcgcaccgacgccgaccggcggctcaaagagctgggcgaactgaaccagtacgccgcccagccgcaggaggccgattcggggaaaatggtcctcggcgaagaagagatgcgcagactgctggaagacacccaaaacgggatgctgtatgcggacgacttcgtgatcgccgaagagacccaccaccacaaggtcgagaccgagcaggaaaacgccttcgtgaagatcgagaacgatccccgcatcacccgtctgggccgcttcctgcgcaaatacagcatcgacgagctgccgcagctcttcaacatcctgcggggcgacatgtcggtggtgggcaaccgcccgctgccgctctacgaagccgaacgcctcacgagcgacgaatatatcgaacgtttcatgtgcccctctggcctcacgggcctgtggcaggtcgagaaacgcggacaggcgggcaagctctcgcccgaacagcgcaagcagctcgacatcgagtacgcccgcaaaatgtcgccgtggttcgacctgaagataattctgcgcacactcacggcgttcatacagaaagaaaacgtataaaaacagcaactatgaaaagagcggtcttcacactatggctgctgctggctgccgtcgccgcgacggcacagggcaactcccccgacttcgaattcggatacagcgacctgcagctttcgcctgacgactacatcggcctgcaactgccgccgctgcaccagctgctcgaaaacgcacgcaatacgccgcaggtggagtattacaacaaagccgtcgagatacaagagcgcgaactgaagaacgtgcgccgcaactggcagcactacttcaagatcaacgccaactacaattacggctcgtcggacatctacaaccagaactatcaggacaacagcaaccagatctggaccacgaccaccacgggccgcgagcagagctggtggaacgtcggagcgtcgttctcgctgccgatcgacgagatattcaaccgccgcaacaagatcaagcagcagaaacggcgcatcgaacaggtcgagctggacacggaacgctggctcgaagagcagcgcatcaaggtcatccagcaatacacgctggccgtccagcagctttcggtcctgcggagcgccgtcgaagccatggtcacggcgcaggcgcagtaccgcctgagcgaagccgacttcatcaacggcaaactcgacgcccagacgctgagccgccagaaaaacatcgaaaacgtggccatccgcgagtatgaagaggtccgccggagcctgaacaacgccctgctgacgctcgaagtgctcacccgaacgccgatcatcagcaaaccggcgcccgcaaccgccccccaagcccctaaaaccgaatagtccatgaattacatcgcttataccgcccggtttctctaccgcatcaagtggtggctgatcctcgctccgacagtcgtagcgctggccgtcttcttcaaaatgggcgcccagccccgcaactacaaatccatgacgaccgtctacacgggcatcgtttcgggctacgacatcaccaccaccgaaggcacgcgtcaggactggaacatcatcaacaacgcgatggacaacctgatcaacatcatcctgtcgcagagcacgctcaagaacgtctcgatgcgcctttacgcgcagggactcacgcacctcgatccggacaacgacaaccagtacctgacggcccgcacctcccggtacctgctgaaccggacccccaaggaggtcatggacctcgtggaccgcacctccgaggagaagacgctcgaaaacctgcgcagatttgaggaggccgaccacgacaaccacgtatacggcatgttccactggaacccgccctactacagctatcaggcgctgagccagatcaaggtcaagcgcgtcaccagcagcgacatgctcgaaatcagctacgagaacgacgacccgtacatcgtctacaacacgctggtgatcctcaacgacgaattcgtcaggcagtaccgggacctgcgcttcggcgagacgaacaacgtgatcgcctacttcgagtccgaactggcccgcgtgggcaagaacctgcgagagctggaggattcgctgcgcgactacaacgtcgagcacaaggtgatcaactacgacgagcagaccaagcatatcgccgccctgtcgcgcgactacgaactgcgctacgaggagatcctgctcaacttcgagagcgccgagaaactgcgcaagtcgatcgaagagcaactcgaagggttgcagaccttccacaacaatgcgcagttcatcgagaagctccatacgatcggcagtctctactcgcgcatttcggcggccgaagctttccagccggcgcccaccgagagcggcgagacgctctccgaccgtccgagcatagcggccagtcgcagcaatacgggcgacctgcgcaggaaactggccgaggagacccgcaacctgcaggagataacgaccaacatcgccagccggcagtacaccaaagaggggctttcgaccaactcgatcgtggcggagtggctcgccgccgtactgctcgccgagaaatcgcgggccgagctggcggtcatgaaactgcgcaagaccgaactcgacgacaagtacacccacttctcgcccgtgggttcgacgcttaagcgcaaaggccgcgagatcaacttctcggagcagtcgtacctctcgatcctcacggccctcaacacggcccgcctgcgccagaaaaacctgcagatgacctcggcgacgctcaagatcatcaacccgccggtgctcccgatcaacgccgagccgaacaagcgcaggcttgtcgtggccgcggcgttcctcgccacgttcctcttcgtgctgggattcttcatcctgctggaactgctcgaccgcacgctgcgcgacaaggtccgcgccgagcgcatcaccggcggcagggtcatcggagctttccccggcaaaggacgcttcggacagcggcgctacgccaagcagtaccgcgaaatcgcggcgcgctatatcggcaacgcggcgatcaactatttcgagccgtcgcgccggcccaacatactcaacatactgagcaccgaggccggcgacggcaagagcacgatttcggaacaggtggccgcctatctgcgcgaagccgacatgaaagtccgcgtgatctcatggaacaaggacttcgacgtcgagcagaaatcctacctgctcgccggaaaactcgaagatttcgtgcaggacagaccgggcgaccttccgctctgcgaagccgacgtcgtgctggtggaatacccgcccttctccgacaagtcggtacccaaggagctgctgcggaacgccgcgctgaacatcgtcatcgccccggccaaccgcacgtggaaggatacggaccagctgcttttcgagaaaaccgagaaactcgcgggccgcacgcccgtgaccctctgtctcaactgcgcgcgccgcgacgtggtgcagtccttcacggggctgatgccgccctacacccgcatgcgcagactgggctaccagatcagccagttcggattcacggccgtcaaataaacgcaacccgccatccgcttcaaaaaaaagcccgcaatggaacgctacggcagcataaccacacccgtcagcatcccccggttcatcatcgggggcatgctcgtcggcggcgtggccgtggtcgccatggctttcctgaactacggactgctcgccgggaccgtcgtcgccgccattcccgccgcactctgcatcctgtgggtcacgctgcgcaatcctgcgctggcgatgctcggactgttcgtgatcaattacttcatcatggggctgacccgttacgcccacgacctgccgttcggcatgatcctcgatgcgctgatattctacaacatcctgataataagcctgcaggccatgatgcaccgcatcgaatggaaacgcgccagctccgggctgaccgtcgtcgcggcgatctgggtggcgtactgcgtgctcgaagtggtcaaccccgaatcggtttcggtttcgggatggttctcgtccgtgaggtccgtggcgttctacttcttcttcatcgtggtgctcacccagctcacgatgaacgaatacaagtacctgaaatacatgctcgtcatctggtccgtcctgacgctgatcgccgtgggcaaagcctgcatccagaagttcttcggcttcaacgccgccgaaaactactggctgttcgttctcggcggacgctcgacgcacatcatccacagcggggtccggtatttctcgttcttcagcgacgccgccaacttcggcggctcgatgggactttcgatggtcgtcttttcgatctcggcgctctattaccgcaatccgtggatgaagatatacctgctgctggtcgccgccgcggcctgctacggcatgctgatttcgggcacgcgcagcgcgctggccgtgccgttcgtcggctacacggccttcatcatgatgtcgcgcaacatcaaagtcatcgtcatgggcgtcctgctggtcatcgcggcgttcgtcttcctgaagttcacctcgatcgggcagggcaacgccttggtccggcgtgcgcgcagcgccttcaactcggaagatccgtctttcaaggtccgtcttgaaaatcaggccaaactgcgcgaaataatggcggacaaacccttcggcgcaggcttggggcacggcggcggcaaagccaagactttcaccccgaccgcgccgctgtcacagattccgaccgactcgtggttcgtgatgatctgggtcgaaacgggcgtcgtgggcatcctgctgcacatcggcatcctgctctacatactggcgcggggcgcctatctggtggtcttcaagctgcggaacacgcagctcaggggattcacggcggcgctcacggccggaatttccggcatcgtcgtcatggcctacgccaacgagattctgggacagatacccacgggcgccatcctctacatgagcatgggcttcatcttcctcgcgccgcgcttcgaccgcgagctatcgcgcaaggagattctcgacaaggcgaccgcggcacaacagccccctctgcgggaaaattacgaatgatggagaggcggatatcggtcatatcggtcaattacaacggctacgacctcacctgcgcgatgatcgactcgctgcggcggcatgtcacgactccgctggagatcgtgatcgtggacaacggctcaacgcgcgacgaagcggccccgctgcgggaacgctaccccgacgtcaaggtgctgcgcagcgaacgcaacttagggttcgccggcggcaacaacctcggattcgcggcggcgacgggcgattatctgctgctgctgaacaacgacaccgaagtcaccgaggacaccctgcactacctccgcgaaaccctcgacaacgaccgctcgatcggcgcggtctgtccgaaaatccggtttttcgctcctccgcagcatattcagttcgcgggctacacgcccctgacgcgcatcacgctgcgcaacgccctgatcggcttcggggaacccgacgacgggcggtacgacaccccgcacgacacgccctatgcgcacggcgcggcgatgatggtccggcgcgaaacgctcgaaaaagccggaccgatgccggagatctacttcctctattacgaggagctggactggtcggtacgcatccgcgaacagggccggcgcatcgtctacgatccccgctgcacggtattccacaaggagagcgcgaccacgggccaacaaagccccctgcggagctactgcctgacccgcaaccggctgctcttcgcatggcgcaacctccggggcggcgcgcggctgctttcggtcgcctaccagctctgcatagcggcgcccaaaaacgccgtctcggcgctcgcgcaccggcgcggcgacctcgcgaaagccgtatgccggggcgtacgcgacttcttcaccctgaaaaacaagcaggcatgacgactcttctgaacatagccgactggattttcatcttcgtactgggacttccggtgctctatcttttcgtcttcgcgctcttctcgacgcgcaaaagcatggacgactatccgcaggccaaacgccggcggaagttcgtgacgctgattcccgcctacaaaagcgatgcggtgatcgtccgcacggcgcaggcggccctgcggcaggagtatcccgcacagctgcacgaggtggtcgtgatcgccgaccggctgaaaccccaaacgctggccgaactgcgcacgctgccgatccgcgtgctggaggtctccttcgaaaacagctccaaggccaaggcgctgaatttcgcggtcgaagagctgggacccgaagccgccgaagccgtcacgatcctcgacgccgacaatctggccggcgaagatttcatcgcccggctcaacgacgtcttcgacagcggcgtgcaagccgtacaggcccaccgcacggccaagaaccgcgacaccgacaccgccgtgctggatgcggcgagcgaagagatcaacaacgccatattccgccgcggacacgtggcgctgggactctcctcggcgctcatcggttcgggcatggccttcgaatacaagtggttccgcgacaacatcgcccgctgcaccacgtcgggcgaagacaaggaactcgaagcgctgctgctcaggcagggcatctacatcgactacatcgacggcctgcgcgtgctggacgagaaggtgcagggcgaaggcgcctactacaaccagcggcgcagatggatcgccgcgcagttctacgcgctggggtcggccgtccggcagctgccgggcgcaatcgccgcgggcaacctcgactactgcgacaaactcctgcaatggtgcctgccgccgcgcatcctgctgatggggctggtgccgctttggacggccgcgatgaccgtattcgatcccctcggctcgataaaatggtggatcgtactgctcctgctgctcttcgcgctggcgctggcgctccccgacgagcagaccgaccggcagctgggccgcgccttgcgccgcatgcccgtactgttcctgctgaccgcagccaaccttttccgcctgcggggcaccaaagacaaattcatccacaccgaacacaccggggccggcggcaacgctcccggtgccaacaccccgaccgaaccatgaaaatagcaatcgaggcacagcgcatcttccgccccaacaaacacggcatggacttcgtggcgctcgaaaccatccgctgcctgcagaagatcgacacgaaaaacgaatacttcatcttcacgggcgaaggcggggaccgctgtctggaggagacgcccaacatgcatatcgagacgctccgctgcccgacctatccgctctgggagcagtgggcgctgccgcgcgccgtggcgcgggtcaaacccgacctgctgcactgcacgagcaacacggcgcccgtatggggccgcactccgctggtgctgacgctgcacgacatcatcttcctcgaaaagcaggcttcgcgcaacaagtcgtcctaccagtcgctgggacgcatctaccgccggctggtcgtgccgcgcatcctgcccaagtgccggaagatcatcaccgtctcgcaattcgaatgcgaccgcatccgcacggccctcggtctcgatcccgaacggatcacggccatctacaacggctacaacgaacggttccggccgctggacgatgtggcgcggaccgtcggcaaatacctctccgatcccggctacatcttctttctgggcaacaccgaccccaagaagaacacgtccggcacgttgcgcgcctacgccgagtacgtgcgccgctcggagaaacccctgccgctgctggtcgccgacctgagggagcaggccgcggaggagattctgcgcgagatcggcgcgcctgaactgcgcgggatgctccgtctgccggggtatatccccaacggcgacctcccggccgtctacaacggcgcatcggcgttcctctacacctcgctgcgcgagagtttcggaattccgcagctcgaagcgatggcctgcggcacgcccgtggtgacgtcgaacacctcggcgatccccgaagtggccggtccgggagcaattctcgtcgatccgacttcgccgacggcgatcgccgacgccctgctgcgcctcgaaaccgatccggcgttccgcgccgaacaggtcgcctacggactcgaacgggtcaaactcttctcttgggaagagacggcccggcagctgctggcgctttacgaatcgctcggcagatagagcgcaaacccgcccgccgccccgaatcggcggagcggcgggcggaacaggccgaagcggccgataaaaaaaggaagggcgttgcccttccttttccgtttccggtatttgcggtcttattttctcttcacgaggtgcttctccacgccgtgcagataccactcctgcgccaccgcgccgcccgactgcgcccattcgagcatttggggataagccttcaggaaatcggtcttctcgtaggcatgctgaatgtcgaagggaatattgatcgcccagaccagcccgtcgttcgaatagtagaagcggccggctctgtcggtataggcgctctgtccggccagcgcattgtagtcggccgtcgcggcgggcgtaggctcgaaaccgccccggtggatctctatgcggcggccgtccgattcccggtcgcgggtcaggaagaaatcgaacgtatcgaaagccacattctcgatggcgatcgaattgcggaaatagaccatgaacgaagcctcggcaagccggtcttcgggcatctcatagccttcctccgtattcacataggcggcacccgcagggcggttggcgttttcacggatgttcaggaacttcagcaccgccggctccttgacgtaattcggagagttgagcgcgaccaactccgcttcgggagcgtttttgctgttgtagggttcgatctggtcgatctcgccgcccttgacgcccttcatcgcaagacacaaatcgtagggaatggaaccgccgaccgccttcacacggacgccgatcagcatcgcattgaccttgttcttgttctgcatgtagagctggatcttgtagttgacgacgaaatcgttgaaatcgaagtcgccgtaagcgggccagaggtcctcgaacatcagcgtgccccatccattcctgcgggcggggatgtagatcaatccctcatcgacgctggcttcgtcgtcattaccgattccggcgcgggtgccgctcgccgctttcggatcgagggagcagaaagcgccgtcggaagtcactggcacggccacctgcggcgaaacgccgctttcggtccggcagctcacatagagcgtccgcgtcgcggccggcacgtcgagcttcaccggatcggcgtcgccgccgaccataaacgaagcgaaaggctcggcctcttgcccggcagccacatatacgcgggtgggttgcggagcggtgaaattacaggcgaccgaagccgtcgttttccaaccgaacgaggaagggacgctcatctccgcgaatttgccggcatcgcctgccggtccgggagtcggcgcatcttcggcacaccctgcaaagctcagtgcagcggcggcgaaaaggagaatttttttcataattcaaaaagtcggatcatccgataaaagtgtcgcagaaacaaaagtagcgcatatattcaattccgccaaattttcaaacaaaaaagcccgtaattttattgaaatatgccaaaaactgcgccataacactcctgatttcgcacaacacggttacgtatatcgcagaagtttgctatctttgtggttatgattgacaaaatcaaaaacaatccccggctgaaaaagttcgtcatcgggttgatttcgcctcacaaacacccgcgtccgcggctctgggtgcgctggctggtaaacccttttgttcacaaaaagggccggggtgcgctgatccgccgccatgcgcggctcgacgtttttccatggcggcggttcgaggtggggcgcgacgccctgatcgaagattatgcggtcgtcaacaacggcgccggagacgtcctgatcggcgacgcggcccgcatcggcatcggatcggtggtcatcggtcccgtgcgcatgggcgaccgcgccggactgggacagcacgtcttcatatcgggcttcaaccacggctatgccgacggcacgcgcgactcgaacgagcagaagctcgtccgcaaggaggtggtgatcggccgcgaatcgcacatcggagccaattcggtggtcgtggcgggcgttgagatcggcgaacgctgccagatcggcgccgggagcgtcgtgacgaagaatatccctccgtacagcgtcgccgtgggcaatccggcgcgcgtcatcaaacgctacgaccccgaaaacaagacatgggtgaaaatctaaccggcgcatgaagattctgatcgcatatacggcttccggcacttcggacaaccctttcgtgcggctgctcgccgacggcatccgcgcctgcggatacgaggtcgtatgctcggtcgaagagttccgcagcaacgccgcggactacgacatcgtacacctccaatggcccgaagagctgttccgctggaaggcaccggctccggccgacgtcgatactctcgaacagcagctccagacgctgaaaaacaacggaataccgctgatatacacccgtcacaacaccctgccgcaccacggcaatccgctcgtggccgaggcttacggactagtggaaagatatgccgacgccatcgtacatctgggcgactgcagcctccgggaattcacggcggcgcatccggattcggagcagctgcaggtcatgatcccgcaccacatctacgaagggctgtacgacatggacattacgcgcgacgcaggccgccgcgcgctcggcatcccggccgaccggctggtggtgctggccttcggggcgttccgccacgcggaggagcgcaggctggtatggggcgcgttccgccgactgcactacccggccaaattcctgctcgcgccgcgcctgtggccctacacccggcgcggatcgcggttcaaagggctgaaacggctcgccggacgcctgctttacgccgcggcgcatagcgccgaaggcttcttcgacagccgcatcacctcgcccgaaccgctgattcccgacgaacagctgccctgctacctcgccgccgccgacgtggttttcatccagcggacggacatcctcaattcgggcaacgtcccgctggcgctgagcttcggacgcgtggtgacgggtcccgccagcggcaacatcggcggcctgctcgccgagacgggcaacccggcattcgatcccgccgacccgcggtcggtggatatcgcgctggaacgggccgcgcgcctctcggcgacggaccaaggcgcccgcaaccgcgcctatgcgcaggaacacttcggcatcggacgcatcgccgcaatgtacggcgggctttacgaacgactttatgacggaaaacgacaataaacaaccccatacggtagggcgtcagctggcttcgggcgtcttctacacctcgatcgcgaaatacgccggcatcgtggtgacgctcgtggtgtcgggcgtgctggcgcgcctgttcacccccgaagagttcggcgtggtgaatatcgccaccgtggtcatcgccttcttcgccatcttcagcgatctgggcatcggcccggcggtcatccagcacaagaatctcgacaaacgcgatctgggcggcatcttctcgctcacgttgtggtccggagccgtcatggcgctgctcttcttcgccgcatcggggctgatcgcctcgttttacgacgattcggccgaactgcgcaacatcctgcgcatactctccgcaaacctctttttcgccgcggcgaatatcgtccccaacggactcatactcaaagagaagcgattcagattcgctgccgtgcgatcgctctcggtgcaggtcgtcggcggcgcggcggccatcgccgccgcctatgccggggcggggatttacgcgctgacgatcaatccggtcttttcgagcctgatgctcttcgtgataaactaccgccagaatccgctttcggtgcacctcaaacccggaaaggcggccgtcggcaaggtgttctcgttctcggcctaccagttttcgttccagctgctcaactacttcagccgcaacctcgacaagctgctgatgggccgttacatgagcctttcgcagctggggtactacgacaaatcgtaccgcctgatgatgctgccgctgcaaaatatcgcctacgtcgtatcgcccgtcatgcacccgatcttctcggagatgcagaacgacctgcgcaaactggccgactcgtaccgcaaagtcgtccgcctgctggcgctgatcggcctgcccctctcggtggtgctgtggttcacggcgcaggagctggtcctcatcatcttcggcgaccagtggcagccttcggtcccggtattccggattctggcgctctcggtgggcatccagatcgtcatgtccacctcaggctcgattttccaagcggccaacgccacacggatgctcttcttctgcggcctcttctcggcggcgctcaacacggcggccatatgcaccggcatcttcgccttcggcacgacccaagccgtggcgtggtgcatctgcatctcgttcgcaatcaacttcatccaatgctaccacgcgctgttctgcctgacgctgcgcacggggtggggcgccttctggcgcagtttcctctcgcccctgctgctctcggcgctcgtctgcctgccgctggcggccgtcgaatggctgctgccgccgatgcctatgctcgtgtcgcttgcggcgaaaggcgccgcggcgctggccgtatggctgctctacatccagttcagcggccaatacgacctgaaaggaaccgccctccgtctcctctcccgcaaaaaccgataactcaatgaaaggattattcgtcgttttccacggcttctcggcccatagcggcatcagcaagaagatcttctcccaatgcgacgccctgcgccggaacggcgccgacgtcgagctgtgccacctcgaaatcgcggccgacggcacgcagcgccgcatggtcggcggacgtgcgatccgcacgttcgggcagggactgcgggccaagatcgccaaacgggtgtcgctgggcgacatcacgcgccacatccgcgacgagggcgtggagttcctctacatccgctacgaccacaacgccagcccggtgctgatccattggctgcgcaaagtcaaaaaactcggcgtgcgcatcgcgctcgaaataccgacctacccctacgacgccgaattcgcacagtcgcccttcgtgcgcaaactcaagctgcgcatcgaccgcatcttccgccgccggatggcccgctgggtagaccgcatcgtgaccttctccgacgaccccgaaatcttcgggcgtccgacaatccgcatctccaacggcatcgacttccggagcatcccgctcaagacgcagcggcacggcagcccccacgaaatcaggctgctggccgtggcgaacatccacttctggcacggtctggaccgcgtgatcgagggcctgaaagcctattacgccggtccccaccagtgcatcatccgcctgcgcatcgcgggcgacggcatcgagtcgctcatcgacggctaccgccgcacgatcgaggagtacgggctgagcgaatacgccgaagtgatcggaccccgttcgggtgcggcactcgacgccgaattcgagtggtgcgacatgggcatagccagtctgggccgtcaccgcaacggcattacccgcatcaagaccctcaaaaaccgtgaatacgccgcacgcggcatcccgttcgtttactccgagaacgacagcgacttcgacggcatgccctacgtgatgaaggccccggccgacgatacgccgctcgacatcacggccctcgtccgcttctgcgacggcgtgaacctcactccggcgcagatccgcgcgtcggtcgaaggcaccctctcgtgggacagacagatgaaacaggtattaaccgaacttttcgaagcatgacgaccatagccatactcttctgggcgggggttttcctcgtcttctacacctacctcggctacggcatcctgctgtggacgctggtgaaaatccgcgaagccctgcgccctgcgcgccggtacgaagttccggccgaggcgcccgaagtgacgctgctgatcgccgcctacaacgaacaggagatcgtggccgaaaagatggccaactgccgcgcgctggagtatcccgccagcaaactccgcataacgtggatcaccgacggctcgaccgaccggacggtcgaactgctggcggcctaccccgacgcgaccgttctgcacgacgcacggcgcggcggcaagaccgcggcgctgaaccgcgcgctggaacacatccgcacgccgctcgtggtcttcaccgacgccaacacgatgctcaatctcgaagccgtgacggagatcgtccgctgtttcgaggacccgcaggtcgggtgcgtggcgggcgagaagcgcgtggccgacgcaggcggagcgggagccgccgccaccgaaggcgtctactggaaatacgaatcgaaactcaaggagctggactaccggctctattctgcggtcggagccgcgggcgaactgttcgccgtgcgacgcggactgtggcagacactgcccgaagacacgctgctcgacgatttcgtctgctcgatgctgatcgcgtcgcagggttacaaaatcgcctactgcaaggaggcgtacgcgctggagacgccctcggccgacatgggcgaggagggcaagcgcaagaaacgcatcgcggccggcggcctgcagtcggtctggcggctgcgcaaactgctcaatccgttccgctacggcgtgctctggttccagtacgtctcgcaccgggtgctgcgctggacgctgacgcccgtggtgctggtcgccctgctgccgctcaacgtcgccctgctgtggtcggggcatccgacgctttacgccgtgacgctgggcctgcagtgcgccttctacctcgcggcgctcgcgggccgggcgctcgaacgcagcggacgccgcagccgcctgctgttcatcccctactactttctcttcatgaacctcaacgtgttccgcggcacgacctacctcgcaacccatcggggacggggcgcttgggaaaaagccaaaagggcctgaagtttttgataacgagcgaaaaataatactatatttgcattgtaaaaagtcgttccccatgaaaaacatcgccataaaaccggaggattacacgatcctcgccgtcgatgacatcgcgaccaacatcatgctgctgaaagccgtgctgagccgcgccaagtacaagatcgtcacggcatcgggcggttacgaagcgatagagaaagcgtcgaaagagactccggacctgatcctgctcgacatcatgatgcccgatctggacggttacgaagtgatcaagcacctcaaggccgaccccgtcacgcaggacattccggtgatcttcctcacggcgctccacaaccccgaagacatcgtcaaaggcttcaagctgggcgccagcgactacgtctccaagccgttcaaccacgaagagctgatcacccgcgtaacccaccatatctatctggccgcggcgcagcggaccatcatgcagcagcgcgacgaactgcaggccacggtcgatgcgcgcgacaaaatgtattcggtcatcgcccacgacctgcgctcgcccatcgggacgctcaagatggtcttcaacatgctcctgatgaacctcaccccggagcagatcggcgaggaaaacctcgaaatggtgaccatgggcaacaacatcaccgaaagcaccttcatgctgctggacaacctgctgaaatggaccaagagccagacgggacgcatgaattcggtctttcaggaggtggacatctccgaagtggtggtcttcgccagcaaaatgtcggacctcgtggcgcaggtcaagagcatctccgtcgaatacgacattcccggtccgatttcggtgaactgcgacgtggacatggtcaagacgatcatgcgcaacctgatgtccaacgccatcaaatacagcaacgagggcggacgcatcgtcatctcggtgcacgagacgccgacacacgcacgcatcagcgtccgcgacttcggcacgggcatcagggaggaggacatccccaagctgctcaaccccgaaatccactacacgacctacggcaccaagaacgaagagggatcgggtctgggtctccaactggtgcaggacctcacgcggcgcaacggcggcgagctgaccatcgaatcggcggagggagagggttcgaccttcaccttcacgatcgccaaggagcagccccggtccgaaaccgtggaggacaccagcggcggcatcgcccggccgtaacgcgccgaggcgcactccgcgcacgaaaccgatatgcaacagcagacgcgaagcccggcccgaaccgcgctccgcgtctgttttttgcaccccggccgaaaagcggcggcgcaaacgtaccgccaccccggccatcgccagcaataagaccagccgcacaaacgcccgccactccgcgccgatacagaccgatgcagagacggggaaagccgcgaaagccgaaatctatttgaaccggagttctgcgatcacgaccttatggtcgctgaccacttcggagggcatgtaatagcgaacgcactcgaaggtgtcgtcatagaagacatagtcgatacgcagcaatccgcccagatagcggaaagtgccgccgtacccgtttccgcaccggcggaaaccgtcggtcagagcacccttcatctcgcggtaggtatacgacgagggcgtatcgttgaagtcgcccgccagaattaccggatagggcgacgcatccgtctcggcgcggatttcacgcacctgcgcggcacgaatccggctgttgcggtccacggcgccgagcatcgaatcgaccggggcttcccggttgtagtccttctggaagcggcggcgcagctgggcgatgcccgaagtctggaggtgcaccgaaaaaatgcgcagcgtgtctccctccacgagcaggtcggcgcgcaggtagtcgttgctggtatcgggaaaccggacgtatttgcagtcgaggatcggatagcggctggcgacggctccgttgccctcggaaacgaaatagggcatccggcgcgaaaagagtgcgccgatgctgtcggccgggaactcgccgtcgtcgagaaactcctgcaaacataacacatcgacctgctcgtggcgcatcatctcagccacggcggccgcggtgatggacttagggcccagctggcggaatccgttgacgttgagcgtggcgatacggatgtcgtgcgacccggcgggcgcgttgaagtcgggcagctggatcatggacgagacgtagcccatattcagaagcaaagccgccagcggcatcagcgcgacgatccacctgcggcggatcagccaccagaccaatgcggccagattggccagcaggacgaccggcagcagcaaggcgatcgtagcccagaacccgccctgttccggcgaaacgaacgacgcgcgccagctcagcacagcggcggcaagcagcagtccggtaaagacgacagccagaaaatagagcagacaaaagacggcttttcgacccattttgtgttatcttgtaacgatttgtgcgtgcaaatataacttattcaaaataaaaatcgtacatttacacgccttaatcaaaactatttcgtgccaatgaagcgaatactcatctccggtggtgccggattcatcggttcccacctgtgtgaacgcctgcttaaagagggcaacgacgtcatctgcatcgacaactacttcacgggacacaagagcaacatccgccatttgctgaaacaccccaacttcgaagtcatccgccacgacatcgtctacccctatatggccgaagtcgaggagatttacaacctcgcctgcccggcatcgccgatctactaccagcacgacccgatcaagacgacgcagacctcggtcataggcgccatgaacatgctcgccatcgccaaccgcaaccacgcaaaaatcctgcaggcttcgacctccgaagtatacggcgacccgctgatccatccccagccggaggattactggggacacgtaaacccgctgggactgcgctcgtgctacgacgaaggcaaacgctgcgccgagtcgctcttcatgagctactaccgcgaacacggcgttccggtgaaaatcgtccgcatattcaacacctacggcccgaaaatggacatcaacgacggccgcgtggtttcgaatttcatcgtgcaggcgctgcgcggcgagcagatcaccatctacggcaacggcgagcagacccgcagtttccaatatatcgacgacctgatcgagggaatgctgcgcatgatgaccgcaacgcccgacgacttcacggggccggtcaatatcggcaacccgaacgaattcacgatctccgagctggcgcacatcgtcctcgaactcaccggctccaaatcgaaaatcatccgcatgcccctgccgtcggacgacccgcagcagcgcaaacccgacatcaccctcgcccacaagatgctcggcgactgggaaccgacgatccagctgcgcgacggactgctgaagacgatcgcctacttcgaagaggtcttgtcgcggggaggagtccggcgctgacgaccgtccgccgtttccgccccaccgcctcagccgttccgccggcagcgcctctcccgccggcattccgatccagccgatccctcgatccagccgatctcactcccgccgatccagccgcgccagctgattccagctggttccgccgatcctccagtcccgccgactctccgttcaggccgtttccgccggtccttcctcctctcccggcgaaccgctattccctcagataatcgcggagcaccgctcctgccagccgcaccagcgtccgcgtcggatgcagtccggcaaatccgttgagcatgccccaatcgtgtatcacgccgttgaagcgcacggtcgtaacctcgacgcccgcctcgtccagccaacgtcccatcttctcgccctcgtcgcgcaggatatcgttctcggcgacggcgatcagcgtaggcggcagcccccgcaggcgttcggccgaagcccgcacgggcgacatcaggtcgctgccgcgctgcgccgggtccgagacatactgttcgaacatccacttcatcaaaggtgcggtcagaaaccgctgacgcccgtactccacataggaatcccagtcatatccggcgtcggtcaccggccacatcagcaccagcgtgcggatctgcggtccgccgtgatccttggccagaagagccgccgccagcgacatgttgccgccaacgctgttgccggccagagccagccggctgccgtccacacctatctcacggccgttttcggccacccatttcacggcaatgtaaatctcctcgacggcctgcggaaaccgcgcttcgggcgaaggcgtatagttgacgaaaaccgccgcgcaacccgactccgcgaccagatcgcgcaccagcctgcggtgggtcggataatcgcccagcacccagccgccgccgtggacgaagacgaaaaccggcagccgttcccggccggttcccgccggccgcacaagattcaggtgcagggtgcgcccctcgctctcgatggtccgttcggactcttcgacgcccgacagatcgaccggaacggccgcctgcagatcggccagcacgcggcgcgcgtcgggcacgggcagcgactcgacggcgggtccgccgccgttcaacacgtccagataggtcttggttccctgcgacagccgttactgcgccatggcgtggcggtagccgtcgattttggcccagtcgccgcgggtgaaatccggaacggcgacgggcgcgttgttatgttcgagcgaagccgccgtcagcgcgccgatgcaggaccattcggccgcgtcgtaaacgtcctgatcgagcggaagaccgtgctgcaggcagtaaaccagccggtaatccatgatgaagtccatgccaccgtggccgcccacctgacgggccttgtcctcgatgtcgcggacgatcgggtgcttgtaacgctccataagcgtcttccgggcctcggcgggaatgaacgagtgtccgctcaggttctcgtggtcggggacctcgcccgccagctgttcgggacggaacgcatagccctgaaccggatatttgttggcgaacccttcggtgccggtaagctgatacatgcggctgtagggacggggcgtatagacgttgtgttccaaaaggatcgtgcggcccttctcggtcttgatgagcgtcagcgtctgatcgccgttggcgaaggtttcggcgcccatcttctccttggcggttttgagtccgttgatcgactcggtgtccatcgacaccagacgggtcatcctgtcgccgcggtggatgtccagcagctggcaggccggaccgagtccgtgcgtagcgtaaacgtcgccgcggtgcgactggttgaagtcgagacgccagttgccctgataatgctcccagaacggatcgaggtcgtggatgtacgaaccttcggtgtggatgatctcgccgaacagcccgtgctgggccatgttgagcgtcgtcagctcgaaaaagtcgtaaacgcagttttcgagcatcatgcagtgacgctgggtcttttcggcggtatcgaccagctgccagcactcttcgagcgacatggcggcgggaacctccacggccacgtgcttgccgtgctccatggcgtaaaccgccatcggcacatgcagctgccacggggtgcagatatagacgaggtcgatgtcgtcgcgccggcaaagctctttccagccctcctcaccgctgtaggccgcggctgcggggagattccggccggcgaggatctcctgcgacttttcgacccggtcgggatagaggtcgcagagcgccttgatctcgacgccgtcgaggtaggtgaaacgctccacggcgcccggaccgcgcatgcccagcccgatgaatccgacccgcacgacgggcatcggatcggtcgtcagccgcagcaccgaatgctggccctcggcacgggccggggcatcgaaaacaatcacaccgtccacgacgctgtaacccttcggcgaagactcgcaggccgcaaggaagagcgcagcggcgaccgcacaaaacaaaaaggcaaatttcttcatttattccgtagtttttagatgttcgtgcaaaaatatggaatattttgaaatatgcggtcatttgactacttttgcccacgtaaaaatcacacaccatgtttcgtaaactgacggcggcaatcctatcggtcattctgctctctccgggatggctcggcgcaacgggtctcacgctgccgttcgcactcgttccgctgctatggatcagctcgtcgtacgacgcttcgcgccgttcgtggcggcgcatgttcggctgggccgcgctgaccttcgcgctgtggaacgtcgcgacggtgtggtggctatggaacgcaactcccgtgggtcccgtcgcggcgacgctggcttcgacattcttcaacatgatcgccttcatgttgtttcacacggtttcgaaaaaaggccccaaggccttgggctacacgctgctcgtcgcaggctggatcgccacggaatactggtacacggtcggcgagttttcgtggccgtggctgattctgggcaacggattctcgcacgagacatggctcgtgcagtggtacgaatatacgggcgtcttcggcggttcgctgtgggtgctgctctgcaatatcctcttcttcgaggcgatccgcgcacggcgcaatgcggcccgctgggccgcggcggccggcatgctgctcgtcccggccgccgtatcgctgggcatctggtggagctggcagcaacccgccgaagggacggccgaggtgagcgtcgtccagcccaacgtggactgttacgacaaattcaacggccgcgcggagtggcaggagcgcaacatcgtcgacctgctgacggaagtccccgccggagcgcagttcatcctgctccccgaaacggccgtgccgagacattactgggaaccgggactcaccgagacccggttcgacaacgagccgggaccgttctggcaggagctggccgacacgctccgcagcagccatccgcaggcgctgctcgtcaccggcgccttcaccaaccgctattacgcggcgggactgcagccccgcacggccgtgggcaacccttacggcgacggctactacgacgacttcaacacggccgtgggactcgactccgcaggccgcacgcagctgcaccacaaaggcaagctggtgatcggcgtggaaaacaccccgacggtcatcttcgacctcatgcagtttctggtcatcgacttgggcggcgtcgtagggcagatcggcatgggccagcacggtacggccttcgcgcacgccggcatgcgcatgggcccggccatctgctacgaaggactttacggcgacttctacggcgacttcgtgcgccggggagcgcagttcatggccatcatctcgaacgacggctggtggggcgacacgccgggttacaagcacctgttcaccatctcgcggctgcgggccatcgaacaccgccgcgccatcgcccgctcggccaatacgggcatgtcgggcttcatatcggcccgcggcgacatcggggagaccctcggctgggaaaagcggggcgtgatctccgccgccgtgcccctcaactccgaactcaccttctacacccgatacggcgactatctgggccgcattgccgagtacctgacactgctctgcgtgctttactacatcgcctaccgggtcaaaagggaaaattacctcgtaaaataaaacccgaaacccgatatgaattacacccagaccctcgaattcctcttctcgtcgctgccggtcttcgaagccaaaggcgcgacggcctacaagccgggattggagcgtatcaccgcgttctgccgccacataggcaatccccagcgtaactttttcacgatccacgtggcgggaaccaacggcaaaggttccgtgtcgcatatcatcgcatcggtgctccagcaggcgggctaccgcacggggcttttcacctcgccccacctgcaggatttccgcgaacgcatccgggtggacggagagatgattcccaaacagaaagtggtgaacttcgtggacaagcaccacggcaagatggtcgagctggagctgtcgttcttcgagatgaccgccgcgctggctttcgactacttcgcgcagagcgacgtcgaggtggccgtgatcgaaacgggactcggaggacgtctcgacgccacgaacatcatcgtgccgctggtgagcgtcatcaccaacgtggggctggaccacacggcgctgctgggcgacacgctgccgaaaatcgccgccgagaaggccggcatcatcaaaaagagcattccggtagtcatcggcgagagcgatccccgctacaacgaggtcatcgagcagaccgccgccgccaacaagtcgaaggtcatctacgccgagcaggagttctcgtgcgagccctgcccctgcggaaccgaccgccaacacttctgcatgcaccgcacccgcgacaaccgcaacttcgaggtcgatctcgatctggggggcaactaccagcgccgcaacatggtcacggcagccgcaacggtcgatttcctgcacgaggagacgccgctgaccatctcccgccgcgccttcctcgaaggtgcgcgcgacacggcagccaacacctcgctcatgggccgctggcagaagctgggcgaacagccgcttacggtctgcgacacaggccacaacccccacggcatcgcctacgtcgcccggcagctcaaagccacgccccacaaacaactctactgcgtgatcggcttcgtccgcgacaaggacctcgcccatatcctccccctgctgccgcacgacgcccactatatcttcacgcaggcgaagaccgaacgggccttctctgccgccgagcttaccgccaaagccgcgatctacgggctgcacggcgagaccgtcaccgaagttcccgccgcagtcgcccgcgccaaggagctggccggcgccgacgacatgatcttcatcggcggcagcacctatgtggtcgccgaagccttgtaaaaccgtctgacagatcgcgacgcatccgcagacaacttatattataatccggaccgggaaaagatacgccctatctttccggtccgtttttttcgatttccgcgcggcgggacaaaaatctttccggccggaaaaacagatttcgcggccccgcaacaacgatttgaggcagagcgttttcgatttgggggattttgattttgcaaataatactaaaagtcttaattttggcatattaattacccccgatgcaccagaaaccgaccaaaacctgcattacctccgcggagttcgggagattgtattccgactacaatccccggtttaccgaggtcgcctaccgttacgtgcgcgaccggggaattgcggaggatctggtgtcggacagtttcatggcgttctgggaggagcgggaccggctgccggaagatgtgaacgccccggcttacgtgctgaccatcgtcaaaaataagtgcctgaaccacctgaaggtccggttgctgcacctgcagatcgagaaaaagctgcattcgaccccagcagcggctgatccagtccgacattcagtcattggcggcctgcgttcccgacacgctgttcgtggaggagatgcagacgatgctcgaccgcgccgtcagccggatgccggatgccggatgccggaacttacgcggcgcattttcgaaggcagccgctacgagaacaaaagctacaaagagcttgctcaggagctgaacatcgccttcacccacgtcaatttcgagatgcggcgggcgctgaaaatacttagggaagaattcaaggactatattttcgcgctgatcatactgctggctgtcagcaacttgatttaataaaataaattattaaacaaataaatgcaccgtttcactactaacacggtgcatttgtttgttattactactaacagagagaaaaagagaagatggacgatttattactgtacaagtttttgcagaacgaagcgtcggaagacgaaatcaggacggtattggactggctcgacgccgacccggccaaccggaaatatttcgacgggctggacaatatgctcaatgccgcccgcgtaaaccgccccgcaggccggaaacccctgcgtcgtccgctcccgtcgctgcgcagtatcggcgcatggagcatgcgcatcgcggcagtcctgtgcttatgtctcggagtgagttatttcgcagctacgaagatgttcgaccgcaaggcttccaacaattcactgagcgtgttcgtacccaacggcgagcgcatcagcatgacgctcaccgacggcacgaccgtatggctcaattcgggcacgacgctggaatatccggcggtttttgcacgcggagagcgccgggtgaaggtcacgggcgaagcgatgttcgacgtcaagagcgacccgcagcatccgttcgtcgtcgagacgttcgcctgcgacgtaagggtgctgggcaccaaattcaacgtagaggcgaacgaagagaaggggattttcagcgccgacctgctccgcggcaaggttcaggtctgcaaccggacggaccgcagcgaccggattacgatggagccgaaccagacggtccatctggaaaacggaaagttgcagcttcacgcgcaggagaacgccgacaaactgctctggacggacggcatcctctgcataacgggaatgacgttcgaggaggtcatggccaagttcgaacgctgctacgacatcaacgtggaaattctgcgcgacgacctgccccagatcgagttccagcgatgcaagctccgcatcagcgaagggatagaccacgccctcgcggtgctgcagcacgcggccgatttcaggtacgaacgagatattacgaccaatacgctctatatcagataacgaatgaagtacgaacccaacagcccgatgcctatgagaaagtaaccgagaacccttttcttccgtatcaagtcctgataaaaaaagaaaacctatgaatgttggcgcatccataggtacattcttcaggcgtaaaacctacttaaaccctagaatttatacaaaagtatgaacaaaaaattgattctgcaaatcaggagtttatattcgctgctatttgctgtatctctatctttgtcatccgtcgcggcttttgcccagccggcaccgccccggatcacgatcacgatggcggacgttccgatggaacgggtgattgacgccatcgaaaaacaatccagttatctcttcgccatcgacacgaacgtgaacatttcccagaaggtcagcgtctcctgcacggatgcctccgtcgagaccgcactgacgcagatggtcaaaggaaccgacgtggcttaccgcatcgacgcctcgaacgtcgtgctctcggcggtccgcaaagaggtgagcgcacaaccccgattcgtttccggcaaggttctcgacgcacagggaaaccccgttgtcggagcggccgtcatcgtcaaagggacgaccgtcggcatgagcaccggagccgacggagactactcgctgcagatatccccctcggccgggaacgccgtgctggtcgtcaattatctgggcttccgccccgtagaggtcaccgtggggaatcgcacgcagatcgatttcacgctgcacgaagagtcgcaggccgtagacgccgtggtcgtaacggccctcggcatcaagcgctcggaaaaggcgctcagctacaacgcccagcaggtgagttcggaggatatcagcatcgtgaaggacgtcaatctgatgaattcgctgaacggtaaaatcgcaggcgcggtcatcaattcgtcggcgtcgggcatcggcggcgccacccgcgtagtgcttcgcggtctgaaatccatcagcagcagcaacaacgccctctacgtggtggacggcattcccctcttcaacaataacaacggcgagataaagagcgagttcgagtcgcagccccgcggcgagggtctcacggacctcaacccggacgacatcgaatccatgaccgtgctcaccggcccctcggcggcggcgctttacggatcgagcgcggcgaacggcgtgatcgtgatcaccaccaagaagggaaagaccggccggccccagatttcgttctccaaccagacgaccttctcctcgccgctcaaaatgcctgagttccaaaccaaatacggcaaccagccgagaacctactccagctgggggggtactggcgaccccttcgtcctataacccgcaagatttcttcaacacggcggccaacacgcagaccaacgccagcatctccgtgggtaacgagaagaatcagacctacgcttcgctgatgcacgtctatgccaacggtatcctgcccaacaactcatacgacaaatactccgtcacggtccgcaacacgacctcgttcctgcaggatcggatgacgctggacgcaggcttcagctacgtggagaccgaagaccagaacatgctctcggcaggacgctatttcaacccgctgacctcgctctacacctacccgcgcggcgaaagcgtcgaggatctgatgatgttcgagatctatgattcgaacaaaaaacgctacgtgcagaactgggcgtggggccgcggcgcgctcgacatgcagaaccccttgtggatgatgcaccgcaacgtccagaacaacaagcggcggcgctccatgatgaacgcgagcctcacctacaaggtgaccgactggctcaccctcgccggccgcgccaaagccgacctgagcgtcggcgaatcgtcgcgcaagctctacgcatcgaccgacccgctgttcgccggcggcgacaacggattcttcgaattcaccaaagaggaggacacccaccgctacggtgacttcatcgccaccgtaaacaagcactgggagcagttctcgctcttcgccaatgtcggcgccagcatctccgaccagctctccagcatcgccggagcgcgcggtccgctcgaactgcccaacttcttctcgctgaccaacaccaacccctacggcgcatcgggccaacggcttcaggaacgcaaacgcgaacaggagcaggccgtattcgcaagcgtggaggccggatggaggggcatgctctacctcacggccacggtccgcaacgaatggcattccaatctggcctacacgaacaacctgtcgtactgcttcccctcggtcggcctttcgggcctgattcacgaaatggtgaagctcccctcgttcatcgactatctcaaggtgcgggcttcgtgggccgaagtgggcagccccattccttggggcatctcctacctgacctacaaatggaagcagggttcgtggtccacgagcgccaccagaccaatccagaatctccgcccggagaacacgacctcgtgggaggtgggtctgaacgcccggctgttcgccaattcgctctcgctggacttcacctactacaagtccaacaccaaacaccagaccttcctcgtgcccctgtctggttcggccggctacgaaaacatgtacgcgcagacgggcaacgtcgaaaacaagggtttcgagctttcgatcggatacgacaagacatggagggacttctcgtggagctccagcctcacgctcagccacaacaagaacaaggtcgtcgagctgatgaacaactactacgacccgcagacggacaaatactacacgctcaaggagtatgaagtggccagcatgggcggcgccaacttcatcatgaccgaaggcggcaccatgggcgacctgtacgcctacggagacctgcggctcgacgagaacggctacatctacatcaaccccaacgacccgaagctgatggtcacagacgagcgcatcaagctcggctcggtgctgcccgactacaacgccggtttccgcaacgatttctcctacaagggcatcaacctctcgctgctcttctccgcacgcttcggcggcatcgtggtatcgcccacccaaggattcctcgacggactcggagtctcgaaggcgagcgccgatgcgcgcgacgccggcggcgtgcccatcaacaacggcaggatcgacgcgcagcactactacgagaccgtcggtctggggcagctgctctcccactacacctacagcgccacgaacgtccgccttcaggaaatgagcatcggatataccttcccgaagaaatggatgggcgaccgggtcaagctgaccgcatcgctcgtagggcgcaacctctggatgatctactgcaaggccccgttcgaccccgaactcacggcctccaccggttcctacctccaaggtatcgactacttcatgcagccaagcctgcgaagcctcggtttcaatgtccaacttaagttctaaccaagccttaagaccgttatgagaaaatacatgaacatcataaacagactgttgttcggcgccgtcgccttggcggcattgtcctgcacgggcaatttcgaaacctacaaccggaaccccgaccagccgagcacgatagaccgcgacgtctgggactacatcaaaagcatgcagtacaacgtgattcccaccgtcaagaaccaatatcagatcgtggaaaacgtgtcgggaggcgcctacggccgctacttcgcctacgccaaatcgaccgatgcgggatggaacaccggcatgttcgccttttaccgaatcgccaacgactgggccaatcctccctacgaggtacccatgaccaacatttacagcaactggcgggccatcaaggccgaactcgaagagccggaagacgactaccgcatggcgctcgcccagatcatccgcgtggcagccatgcagcgcgtcaccgacattcaggggcccattccctaccgcacgatggagaacaacgacgacctgaccgctccctaccagtcgcaggaggccgtctacggcttcatgctcgaagacctcgaccatgcggtgaacgtgctggagacctgcatcaccctcgccggaacggacgtggtcgcagaagccgcgtcggcggattacgtctacaacggcaacctcgccaaatggatccggttcgccaattcgctcaagctccgtctggccatgcgcatctcgaacgtgtcgcccgatgccgaacgatatgccgaagaggccgtcgcgcacccctacggcgtgatcgaatcgaacgcggacaacgcctcgctcgacgtctcccagaccaacgaccagaatccgctccgctggctggtcgaggattacagcgacgtgcatgcggcggccgagatcgtcacctacatgaagagcttcgacgacccgcgcctctccaaatatttcaaccctgcggtccgggacagcgagtaccacggctcgcgcgtaggcgcctactcctccagccagtggaaggactactattcgcttccgaaaaccaacgccctcgaccggctcatgtggatgaacgccgccgaagtggccttcctgaaggccgaaatggccgtcaacggatgggacgtgacgggcgacgccaagacgctctacgaagagggcatccgcctttcgttcgagcagtatcaggccgaaaactacacgtcctacatcgccggcacggccgcgccgaccgcctattccgatccgcgcagggccaacaactatacgccgggcacggcctacagcgtcaccgtcgcatgggacggcgccctttcggcggaaaagcagcgcgagaagatcatcacccagaaatggatcgccctctatccgctcggaacggaggcgtgggccgagcagcgccgcacgggatacccgcggttctaccccacgcccaccagcaccaacgcctcgaacgagcctaacctgccgaccgaaggcgcttcgcgaatccccttcgccccgaacgaacagacgcgcaacgccgacaactacgacgcggcggtggccctgctgggcgccggcggcgacaagttcggaacccggctgtggtgggacgtcaaaacagacaaacccgcttggtagaaggtttctgccgaccggcaatttttcaatgtaacccgaaaaaaacgacaagtatgaaaaagatattattgatgtgtctgtccctgctgctgttcgcgtcagctctggtctcctgcgaggattggacggagcccgaaagcaaggtgttcctcaagggcgacgggcacgacgacgcctattacgccgccctgcgcaaatggaaggcggagaccgattacgacatggcatggggatggttcggcggttggggcgccaacgccaccaacctcaagaactcgctccggggccttcccgacagcctctatctggcggccatctggggccggtggcgtcccagcgtcctgaccgacgccatgaaggccgacatggagtatgtccagcgggtaaaaggcaccaaagtggtgtgcaccaccattaccggctgggtgggagtcgacgtgatcggaggcgattaccagaacaacccccagaaagaggagtatttcggctggaagcccgaatgggacactccgtcgggctggcgggccgccgacggcaccgacgaacgggccgctcaggaagcctccatccgcaaatacgcccgcatgctcgccgacagcgtttatacgggcggctacagcggcatcgacttggactacgagccgaacgtcggcggagccggctgcaaacgcgagctatccaaccgcgacaacttctacatcttcgtggacgagctgggcaaatacctcggaccgaaatcgggcacggacaaactgctggtcatcgacggagagatcaacgccgtcgaaggccgctgcatgccctatttcgactacttcatctggcaggcgtacagcacctcctccgattcgggactcaacacctacatcagcacggtgatccggaacggttcgggatacatggagccggaagagctgatccgcaagctctacaccacggtcaacttcgaacaatatgccgccgagggcggcggctcctacacgggcggcatcaaccggcttctggggcaggctctctggaaacccacatgggagggcaagacctaccgcaagggcggattcggctcctaccacatcgaatacgaatattatctgtccggcaaatcgggcttctatccgtggacccggcaggccatcaacgccgtacatcggtccgagaacgaagaagaggttccgaacgaataaccgaataaaaccactgcaatgaaaatcaaggcattttatttatcggccgtcgcagcgatcgtgacgggactcgtgtcctgcgacaacgccgaactcaaatacgacgacgtaacgggccccggcagactcttcctgaacgaagcggtcggaacagccaaatcggtctcgttcgtcattcccgacgacggcagcgtctacacggtcacgccccgcatctcgaaaccgctgggcagggatctgaaactcaccgtatacgtggacgagaaggccctcgacgagtacaacaaacagaacaacacctcctacacactgcttccgaacaccaactacgaattcgaaagcagcgcggtgatccccgcaggcaaggtcgtctccaacccggtgacaatcaccctgcatccgctcaccacggagcagaacaagacgggattcgtccatgcgctgcccatcgccgtaaaggccgaaggggatgccatgcaggtgctcgaaggcgccgacgcattcgtcttggccgcaacgccggttccctattcgaacgtagtcgagatcacgggcaacagctatctgcaaacacgcttcgccgaagattacaaactctcgtcgtggaccttcgaaacgctgttcaaccccagtcagatctacaccggcaacacgacgacatggctcgcgtcggccatcggatactacgagcagggcggcacgaagatcattcaggacggcttcatgctccgtctgggcgacagcggcggcggcacgaagaacagcctgatcaacggcatggtcagccgctccggcaaacagatctcctccatcccgctccagtcgaacatctggcaccatatcgccatcgtgtgcgacgaaggtgacatcacgctctacgtgaacggcaacgtcggctacacggccaaatcgggctatgccgcgacgcagttctacgccctgaacggcatccgcttcggtaacgaatccgcttccggcaacctcggaagcctgcgttaccgttactgtcaggtccggttctggtccgtagcgcgcagcgtcgaggagctgaacaacaaccgctatgcggttccggccgacacgccgggtctgctgggctactggaaactcaacgagtacaccgaaggcaaggcgatggttccgggctccacggtaaaatgcatcgaagaggacactccgatgacggaaacggagacctacctcttcaaagacgccacgggcaaacagcccgacgccctcatccaccgggcgtccgcaaacaccccctacatcttcaccccggacaaacgcatcgaggtgggatatacatgggacggcgttctcgcccaataaccgtccgaacgaaacgagcctccccgtaaaaccgaatttacggggaggcggtttctaatgaccactttcctgaaaaaccgtgacatgaaattttcattccacctgctgctggcctgcatcgcgctcacggcctgcggcgagagcggcaaaacgaccgccgattaccggatcgtgccgtgccccggcgaaatcgcgcccggcgacggcggcgatttcgaactggacgcccgcacccggatcgtatgcaccggcgacaacgacggcatgcgcgccaatgcggagtttctcgccggatatgtcgaatcggtcgtcggctcggcccccgaaatcaccggtccggacggcctttgcgacgacggcagggcagtcatcctgcgggccgacgcgccgggcaaaggcggcgaagcgtacgaaatagaggtttccgagaaccgcatcaccgtcagcggagagtccgacgccggcgtgttctacggcatccagacgctccgcaaggcgatgggcgccgcaaaagcagccaaagtgcttttcccggcggtccgcatcgccgacgaaccgtatctgggctaccggggcgtgatgctcgacgtggggcgcacgttctatcccgtcgaagaggtgaagcggatcatcgatctggcggcgctgcacaacctcaacgtcttccactggcacctgaccgacgatcaggggtggcggatcgagatcgacgcctatccccgcctgacggaaaccggggctttccgccgcgacacgacgctcgcaggcgagccgggcaccttcggcggctactacaccaaacggcagatccgcgacatcgtcgagtatgccgcacgccggtatatcgaggtcgttccggagatcgacatgccgggccacatgacggcggcgctcgcctcctaccccgaactcggatgcacgggcggcccgtacgtcatcacctcgcagccgggcgtgcgccgcgacatcctctgcgcgggcaatcccgcggtcttcgatttcgtggaaaaggtcctcgaagaggtgatcggactcttcccctcgaagtacatccacatcgggggcgacgaatcgccgcgcacgcggtggcgggagtgtcccgaatgccagtcgctgatccgcagggcggggctgaaagccgacacccgccacagcgccgaagacaagcttcagggctacttcaacacccggatcgaggagttcctcgcacgccacgggcggcggctgatcggctgggacgaaatcgtggacggcggcatgtcgcccgacgctacggtcatgtcgtggcgcggaacggcaggcggcatccgggccgccgacgagggtttcgacgtcatcatgtcgcccaactcgtcgctttacttcgactattaccagtcggcgaacatcgacaccgaaccgccgaccatcggcggttatattccgctgaaaaaggtctacgacaccgaacccgttcccgaagagctgacgccggagcaggcccgtcacattatcggcgtgcaggccaacgtgtggacgacctacatgcggaccgatacgattctggaacacatgctgctgccccggctggcggcgctcgcggaaagggcgtggtcggacagggagaaggatttcacggacttcatggagcggctcgaccggctcgtcgggttctacgaccgcgacggctacagccacttcccctatttctacgacataaccggcgccttcaccgcggattacggccgcaaggcggtggggatgaccctttcgtcgctgcccggagcggacatccgctacacgctggacggcagcgagccgacggaagagtcgcccctctgcaccgacacggtgtggatcggatcgccgacggcggtccgggcggtcgccgtcctgcccgacggacggcgcagcgaacccttccgcgaggaggtgactttcaacaaggccaccatgaagccgatccggctgctgaccgctccgcatcccaaatacgcggccgccgcgctcaacgacggcctgcggggcaagcgggtcttcacctacggcaactgggcgggctggcaggacgacgacatggaggccgtgatcgacctcggacggcaggaggagatcgcgcaggtggcgttcaacgccctgctggactacgggtcgcacatcatggacgccgcaggagcgaaggtatgggtttcggacgacggcgaaacattccgcgaggtatacggcgagcactatccggaaattccttacggtgccgtcaaacgcattttgcgccacgaagcgaacttctccccggcgctccgggcccgctacgtgaaactgcgggtcatgcgctccaaacagcttcccgaagcttatttcgaccggaatctgcgtccgtttctgtttatcgacgaaatttacgtatattagcagtatggatacacgcggattcaaattatgcgcggccgccgtcggaattctccccgtgaccgcaggatgcacggaccgagcgccgcaggagcatcccaatattctcttcattctctcggacgaccacacctcgcagagctggggcatttacggcggcattctggcgccgtacgccgccaacgacaacatcgcccgccttgccgccgaagggtgcgtgctggacaacgcgttctgcaccaactcgatctcggtgccgagccgggccgcgatcctcaccgggcagtacagccacctgaacggcgtctacacgctcgacgacgcactgcgccccgaacaggacaacatcgccaagcggctgcagcaggccggctaccggacggcgctggtcggcaaatgacatctgaaaaaggaactggcgggattcgactattacagcgttttccacgatcagggcacctaccgcgacccggtattcaagacggccgaaaactggatggacgacgacaagggcgtaggcggtgcggtggaaaagggattctcgaccgatctggtgaccgacaaggcgatccgctggatcaaagagcgggaccggacgaagcccttttcggtgttctgccacttcaaggccacgcacgaaccgtgcgatttcccggagcggttcgcgcacctttacgacggcgtgaggttccccgaaccggaaaacctgctcgaattcggccccgcgaagtcgggccgcacgttcgcgggccagccgctcgaaacgatggcatggcgctggaacaaggcctacaccgatccggagaactggtggacctactaccccgaactgcctttctgcggcgtcgagggcgattcggtcgccaaccgccgggccatctatcagaagctcgtccgcgactacccgcgctgcgccgcggcgatcgacgacaacatcggccgtctgctccgcacgctcgacgaagaggggctggcggagaatacggtcgtgatctacgtctcggatcagggttacttcctcggagagcacggattcttcgacaagcggatcatgtacgaggaaccgctgcgcatgcccttcgtgatccgctacccgaaggagattccggccggaacccgcaacggggacatcgtcaccaacgtcgatttcgcatcgctgctggccgactatgccggagccgaaccgccgcagcaggcgcagggccgcagtttccggagcaacctcgcgggcgacacgccgcaggagtggccccgcagcatgtattaccgttactggacccagcacgaaatacgcccggcgcacatgggcatccgcaacgaccgttacaagctgatcttcttctacggcgaccggctcggcatgaccggctcggacgactgcgtctcgacgccctcgtgggagttctacgacctccggaccgatccgcacgagaaccggaaccagtacggcaacccggcctatacggaagtgatcggagcgatgaaacgcgagatgctcgaactgcgccgacaatacaaggacaccgacgaagggtcggcgcgcatgcgggagatcatggagacccattacgcccccgaaagcgcaaaacactaaccgtcaggattaaaaaacaaaaccgaacatgaaatacctacccattctgccggcggccgcggccgccgcagggatcgtctcgtgcggcacggagccgaaacaacccgattacgtcaatttcatcctcatcaacctcgacgacgccggaaacggagacttctccttctccggagccttgggctacaaaaccccgaacatcgaccggctggccctcgaagggatgcggtacaccaacttctacgccgcgcagcccatcagcggcgcatcccgcgcaggactgctcacggggtgctaccccaaccgcatcggcttcgcccatgcgcccaatccgggctgcccctacggcatcagcgacgaggaggagaccatcgccgaagtgctcaagaaacgcgactacgccacggcgatcttcggcaaatggcacctcggcgacgccaagaagttcctgcctctgcagcacgggttcgacgagtggtacggactgccctactcgaacgacatgtggccctaccaccccaagtggaaattccccgacctgccgacctacgaaggcaacgagatactgggctacaacctcgaccagaccacgctcaccacggactataccgaacgaagcgtgaagttcatccgcgagaacagggagcgccccttcttcctctatctggcccactcgatgccgcacgtgccgctggccgtctcggacaaattcaagggcaaaagcgaacaggggctttacggcgacgtgatgatggagctggactggagcgtcggcgaggtgctccggacgctcgaagagctggggctggagcgcaatacgctggtgatcttcacctcggacaacggtccgtggatcgcctacggcaaccatgccggatcgaccggaggcctgcgcgaagccaaggccacgaccttcaacggaggactccgcgtgccgcttatcgcccgctggaaagggacgatacccgcgggtacggtctgcgaacggctggcctcgaacatcgacctgctgccgaccttcgcccagatcgcccaagcgccgctgcccgcacacaagatcgacggcgtgagcatgctgccgctgctcgaagaccccgacgcggcgccggtccgcgacgcgctctgtctctattatcaggacaacagtctcgaagccgtgaccgacggcacctataaattgattttcccgcacgactacctcgcctacgggacgcccggcgacgacggcatgcccggcgagatgatcccacgccgtgtcgaggaaaaggagctgtacgacatgcggcgcgatccgggcgaacgctgcaacgtgctgtcgcagcaccccgaaatcgctgaaaaactggaagcggtcgccgaacggtaccgtgcggagctgggcgacgacctgacgggctgcgaaggcaccggacggcgcaagccgggatacagataatcccggcaacgacggccggcagaaaccgtcccggagagaggccgggcaacgcgaatcccgcgaaacagcccggtccgccaaacagccgacttgccggatacgcccggacggtttttaccggaccggagcgctttccgcaccatcatccgtcccgaaccgccccggaccgaacggctatccgaaccgcacggacaaccggattgcacgccggccggaccgagacacgccttcggacaaaaacaaagggcgctgcatgtcagcgccctcatttatcttttaagcctcgcccatcttcggtcccgtctcggaagccggcgaaggggtcggaatctcgatcttgcccacgttgctctcgtagcggacgatgttttcctgcagcgaacgcaacagccgtttggcatgttcaggcgtaaggatgatgcggcttttgacacgcgccttctgcacgccgggcagcaccgcggcgaagtcgatgatgaactccgaggtggagtgggagatgatcgccagattcgaatagttgccctgagcgatcgtatcgtcgagttcgaggtcgatcccgaattgtttcatttctgccataggcccgattgttgtttatgcaaaaatactgactaacaagtaccgatatacaactatgcggccaaagttttcgatattttatcaacatatcggccatttcagacaatccggcgcgccctttttttgcctccctttggcggatgtccgaggtttttagtatctttgctcactgaaaactccgcaacaagcgaaaatgggatttgaatttctggacgttatgttccgcggcatctgcgtgggtgtcgccgcatcgatcaccgtcggccccgtagccgtgctctgcatccagcgcacgctgtcgaaaagccgccgttcggggatcgtatcgggtttgggcgtcgcctgcgccgacactttcatggccatggcggcgctgttcttctattcgatgctccagacccagatcgagcagtacaacacgctgctgcgcgtgatcggcggcatcttcgtggtgatcgtcggcgtctacatcttcgcccagaaccccgtcccccagatccgccgcaaccgcgcgggcaaaacctcgctgtggcaggatttcgcctcgatcttcgggcttacgatcgccaacttcatcatggtcatcccctatatcctcgccttcttcgccgtcttcaagatttcgggcggcgacatctcgcacgagggagtgggaggattcatccgcgcggcgttcaccatcgcgggattcttcggcggcgccgcggcatggtggacgatgctggctttcgtcatcaacctcttccgccgccgtttccgcccccgccacatgctgacgatcaaccacgtcgcgggccttatcatcggcatactgggtatttacacgatactttcaacattccttgatatattccccaatgtcggatactaaacacaagatcataatcgccgtagacggattctcgtcgtgcggaaagagcacgttcgccaaagccatcgcccggcgtctgggctacattttcatcgacacgggcgccatgtaccgcgccgtgacgctctatgcgctcgaacacggagcgatccgttcgggcatcgtcgacgaagacgcggtcgtcgggctgctcgaccaaattacgatcacgttccggttcaatcccgaacgcggcgccagcgacatctacgtgaacggcgatctggcggagggcaaaatccggacgatcgaggtcagcaactgcgtgagccaagtgagcgccattccggccgtgcgccgcaagctggtggccatgcagcaggagatgggacgccgccgcggcgtggtgatggacggccgcgacatcggcacggtggtattccccgacgccgaactgaagattttcatgacggccgaccccaaggtgcgggcctgccgccgttacgacgaactgcgcgccaagggcgacgacgtatcgctggaggagatcgagcgcaatgtccgcgagcgcgacaaggccgacatgagccgtgccatatcgcccctgcggcaggccgacgacgctgtcgtgctggacaacagctgcatgacggtcgagcagcagatggcgtggtttatgacggaattggaacgtataaacaaataaacgagtcgggcgaacggcacgatgaaggatttgcgaatagaaatcgacgataaatcgggcttctgcttcggcgtggtccgggccatttcggaggccgagaaggccctcgcagggggagaaacggtctattcgctgggcgacatcgtccacaaccggatcgaagtgcagcggctcgaaaagctgggactgagcaccgtgacccatgccgacatgccccgcctgacgggccgccggctcttcatcagggcgcacggggagccgccgacgacctacgcacgggccgcggaactgggcatcgaagtgatcgacgccacctgcccggtagtcgcccgtctgcaggcccgcgtcgtcaaggcccacgaacggatgcgcccggccggagggcaggtcgtgatcctcggaaaacggggccacgccgaagtggtcggactcacggggcaggtccccgaccaaacgatcgtggtcgaaggggaggcggacctcagtcagatcgacttcacgcgcccggtgtacttcctctcgcagacaacccaaagcatcgccctgttcgaaacgctgggggccgaaatgcgccgccgggcggccaatcccgccgacgtgcatatcgacgacacgatctgccggcaggtctccagccgcgaacagcacctgcaggagttcgcacggcggttcgacgcggtggttttcgtctgcggacgcaaatcgtcgaacggcagggtgctcttcgaagtgtgccgcacggccaacccccggacctgcaacatcgaggaagccgcggagatcgaccccgcatggttcgaaggcgcggaatcggtcggcatatgcggcgccacctccacgcccaaatggctcatgcaggaggtcgccgaccgcatcgggaagatcggaaagggaaaatagatgacagaacagccgcctgcggcaaggcccctcaagaggggaggacggcaaaattacaaacgacgccaacggcggcgaccacgaccggccaaaggcgctgcaacgatacgaatccaacaaaaactgctgttatgaaatacttcatccgctcgttaaaatatttcgtcgccttgtgcgttctatgtgcagcgatcatggcgctgaaccggctgtcgggcttcgcgacgctgacgctcgaagagaccttctacgtgatgttccataccacgcgcggcatgatgctgcccgcggtaatcgtcctgctcgcagccttctaccccaaattcggcttcgtacagcgtaaggtcgagggcgacgtcggggagaaccgtgaacagatcgtaaacgccttcaaatcggcaggcttttcgcttcgcaccgacgaggacggcgtaatgacgttccgcgccgacggcctgctgcgcaagctgacgctgctgggagaagacgagataaaagtttcacagtacggacagtggatcctgctcgacggcatacgccgcggcgtggccagagccggatacaagctggattcgtacatacaaatgacaaaacatgattagaaaaggataccgttatctgctcacggccgccgctgccgcttcggcggcagccctgctgaccttcgccgcccgcaacgacttcgggctggggcgcaacatggagattacggtcaatatgatgcgcgaactgtcgctgagctatgtagacccggtggaccccgacaaactcatggaaggggccgccgaaggcatggtccgcgacctcgatccgtacaccgaattcatccctgaggagcaaatgtccgacttcgagctgctcaccacgggcaaatacggcggcgtgggatcgctcatccgccaaaagggcgactgggtgaagatcgcccagccctacaagggttcgcccgccgaccgggccgggctgaagatcggcgacaagatcctcgccatcgacggcaaggacgccaaaggctttacgaccgagcaggtcagctcccggctcaagggggagccgggcagcaaggtcaaggtgaccgtcgagcacctcgacggcagcaccgagaccgtcaccctgcagcgcgagcgcatctccattccgggcgtgccttacaccggctgggtggccgacggcatcggttacatccgtcacagcgactttaccgaagggtgttacgaagacatgcgcgcagccgtcgagaagctgcgcaccgggggagaactgaagggtctgatcctcgattaccgcagcaacggcggcggcatcatgcaggaggcgatcaagattctgggcatgttcgttcccaaaggcaccgaggtggtaagcaccaaaggccgtacggaggattcgcggcaggtttaccgcacctcgtcggagccgatcctccccgacctgccgctggcggtgctcatcaacggcaattcggcatcggcgtcggagatcgtgaccggcgccttgcaggacctcgaccgtgcggtggtcatcggccagcgcagctacggcaaggggcttgtgcaatcgccgcggccgctgggctacaacgccatgctgaagctcaccacggccaaatactacatcccttcgggccgctgcattcaggccatcgactactcccactcgcaggagggttcggtaaaggccatacccgactcgctcatcaccgagtaccggacccgcgccgggcgcaaggtctacgacggcgggggcatcatgcccgacatccgcaccgaacccgaatacatcagccgcttcgcgatgacgctctatgcgctgggattcgtcgaggatttcggcgacgactacatgcggcgtcatccggatcaacggatcgacatccgcaacttctcgatcacggaccgggattacgccgatttcgccgaattcatgaaagacaagaaggtgccctacgaatcggacacccgccgcgccctcaaagcgctgaaaaaggccgccgaggacgaccgtttcgcagacctcaaggagaagttcgaccgcgtcgaagccgaactgaaggacgacacgcagaccaatctggaaacctaccgcaaggagatcgtcgagacgatcaacaacgacatcgtcatgcgccacgggtactccgaaggggtcatcgaacactcgctcaaagacgatccggaggtactgcgcgccacggagatactcggcgacggcgcggcatacacccgcatcgtcaccgagcaggacacgccgcgcaaataaccgacagccatgaagatccgccgcgacatattctcgttccgcaaccgcgtggtggtcatcatcgtgggcatagccctcggcatggtctcgctgctctacaccaacaacatggccaagcggctcaaggagaaggagcagcacgacgtggcgttgtgggcgcacgccatggagcgggtcaaccgcgacgtgatgggcggttcgatggaggacccgctcattcaggacatcgtctccaacggcaacaacatcccgttcatcatcaccaacgagaacctcgaagtgttccggtcgcacctgattccggacaagatcatcgaccaccccgaccgtctgcgcaggatgatcgacaaactgacggaggagaatccgccgcgcacggtgcggttctggtggtcgaacgaccattaccacatcatcttttacggccgctcggcgctgctcaaatcgctctactacttcccgtacgtgcagattctggtcatcacggccttcatcatgctgggattcatcgctttccgctcatcgaaacacgacgagcagaaccgcgtatggatcggtctggccaaagagacggcccaccagctgggcacgccgacctcgtcgcttctgggatggatcgaatacctgcgttcgcaggacgtggatcagggagccgtcgaggagatgaacaaggacctcacgcacctgatgaagatcgtggaccgcttctcgaaaatcggctccgagacgcccctcacgccggccaatatcaacgagatcgtgggcgaatcggtcatgtatttccgcaaacgcatcccgcgcaacgttacgctcgactacaacggactggccatcgctccggtgcaggccaacatcaacgccgcactgttcgaatgggtcgtcgaaaacctgatgaaaaactcactcgatgccctgcagggccacggctcgatcgacgtacatatctcgtcggacgagaaaaacgtgatgatcgacgtcaaagacacgggcaaaggcattcccaagagcaactggaaacgcatcttcgaaccgggattcaccaccaagacccgcggctggggtctgggactttcgctctcgcgccgcatcgtcgaggactaccatcagggtaaaatcgccgtcatcgaatcggaaatcggcaaaggcaccacgatccgcatcacgctcaaacgcatcttcgaaggatgaccgctctgctgacacataccgcgccggtcccgctccccgccatgcaggaacccggccccgcgtccgtacgcgaagccgccgctcccgctgcgcagcaggctccggccgacacatcggcatcggcacatggccgcggcacggaccgttctgcggcctatccgtccgcagaaaccgcggcgaatacccccgatacggcccaagagacgacacacggcctgtccggcacgggcgattcagcccggaacatcacaccccgaaccgcactgccggccgcccccgccccggcgcaaggcgcggactcgctggcggcggatacgctgtattccgggccgcaggcggctgactcgctgccgttcttttcgctggaaggcccgctgcggggcacggccgacacgctttggcgcgacgcgccggctgaagcggtattcggtccggcatcgaccctcgttccggcccgcgtcctgccggcggccccggctccgtccctcaccgaaaaccccgtctttcagggcttcgtcctgctgctcgccgcaacctacgccatcctgctctaccgcaatctgggcgacatacggctgctgctgacgcgcgtatcgcacgacaccgccacgggcaaacgccttatggaggatccgggcggcagcggtttttcgcacttcctgaacgtcgcgaccgccatcggcatcctcttcgtgggcgtcatgaccgtcaaatacggcgattcgctgattccggacagcctgatcgaaacgattccgcagggcgccgtactggccctcagcctgctggcgacgtttgcctgtctgtgcgtggggcttttccagcggggagtcgtccggctggccggagccgtaacgctctcgcagcccttcgtctcgcagctgatactgctcaaacgcacctatttcacgctgggcgtcatcgtcacgattcccgctctgctgctcttcgcattgtgcccgcggggcacgggagacgtgtggttctgcatcattgtcatcgagttgctcgcaacggtcttcttatatctcagagagacactgaatctgtttctttccaaaaaaatttcgattttgcattggattttgtacctttgcatcgtggaaatattcccaatcagcctcctagggctgcttgcggcaagatgattcagtgattgaagaacaacataaattaggttagaattgaaagtaaaaaaagtattggtttcgcagccgaggcctgcaattatcgagaagtccccgttctacgaattatccgagaaatacaaagtagagatcgcctataaaccgtttatccgcgtagtaggcgtttcgctgaaagagttccgcgcacaacgggtcgaaatactgacgcacacggccgtaattttcacttcgcgcacgacggtagacagtttcttccacatctgcgaagaggcccgcatcacggtgcccgaaaccatgaaatacatttgccagacggaagccgttgcgctctatctgcaaaaatacatcgtctaccgcaaacgcaagatttcgtttgccgacggctcgttcacctcgttcatcgagctgatcatcaagcacaaggacgagaagttcctgctggcgctgagcgaacctcacaaacctgagcttcccgaaacgctcgccaagctcaaaatgtcgttcgatccggctattctggcccgtacggtcgctgcggacatggacgacatcgcgctgaccgattacggcctgctggcgctctactccccgtcggacgtcaagacgctggtcgagaaattcagcacggagaacctgcccgccgtggctgtcttcggcgaaggcacgctgcgcgccgcactcgacgccggaatcaccgtactggccaacgcccccacgcccgaagccccgtcgatggtcaaggcgatcgacatctacctgaacaaggtgcagaaaggcgaggagatagcccccgtcgagttgattaccgacacgcagaaagaggagttcatccgcagccaacagcacaagctggccaagaagagccgcgcacgccgtcctgccgacccccgcaaataatacgcttatgcccgactgctcgctcccccgtacggaacggctccgctcgctcggcgccgtacgtcggatgttcgagagcggcgagagcggttttatcttcccgttccggtacgtatggttcgccgaagccgacgaaataccttcggccgaggtgctgttctccgtacccaagaagttccataaaagggccaataaacgcaacctgctgcgccgccgcaccaaggaggcctaccggctgcaaaagctgttgctgcacaacggccggccggtcaatctcgatctggcgctgatctactcttcgaaggaggagttgtcctataaaacgatctcaaatgcagtccggcgaattctggaaacggtcgcggagcatctttaagcgtatctgcgccctgccgctgatcgcactggtgaagttctaccagctctgcatctcgcctttcacacccccgtcgtgccggtttacgccgacctgctcgcagtacgcgctggaagccctgcgcaaacacggtctgctgaaaggctcgtggctcaccctgcgacggctgtcgcgctgtcacccgtggggcggcagcggatacgatccggtgccctgaaatggtccggcgcccaaaaatgatccggcaaccagaagcggaccgttactctgaaatgggcctgcaacctgaaataggcctgcaccctgaagcataacctttcggcagatgacgttccggcacgtcgaagcacacatgaaaaatccgacccttttcgggccggattttattttgagaatgcgaagccggggatttgaaaggcagagccgtctgcgaatccgtcagtcgctgaaatcgcagcagttctcggcgaccgattcgaattcgagcgtcgcatggtgcacgccggccccgtcgagccgggttttaagctcccgtttcaccgcttccagccggggcaggtccgtgagcacgacatgcgccgtaagggcgttttcggtcgtgctgatggcccagacatggatatgatgcacggcttcgacgcccggcacggcggtcatcgtccgttccagctcgtccacccggattccgtcgggcacgccgtcgagcgaaagccgcaggctggcgcgcgtaagcgaccagaccgaagccacgatcaccgcggcaacgaccagccccacaatcgggtccacgatcgtccagcccgtccacgagatcacgagtcccgacaccagcactccgaccgacaccaacgcatcggcggccatatggagatatgcacccttgacgttcaggtctttgtccttgtccttcatgaagagccacgccgtgaatccgtttatcgccacgccgacgcccgccgtccatgcgatcgcgccgccctcgatgggcgccgggtgcatcatccggccgatactctcggcgacgatcacccccacggcgatcagcaggatcaccgaattgagcagcgagataagcaccgtactcttcttgtagccataggtatagcgcggcgtggcatgcgcctgcgcgagacggaaagcgagcatcgccagcagcaggctcgccacatccgaaaggttgtgcccggcgtcggacagcagtcccatcgacccgtaatagagtccgacggcgaattcgacgacgacgaacgccacgttgagcgtgatgccgaggataaaagccttgttgagcgacgagaccgtatggtcgtgatggtggtcgtgtcccatgatcgtttatatttcggtgatcgtatcccggatttccgagagatcgaccagtttgttgacaatggcgtagatcgtcaggcccgccggggagtggatctgcagtttggccacgatattgcggcggtgcgtgatgaccgtatgggtcgaaatgcagagcgtatcggcgatctgcttgttgctcatgcccttgacgatgcagacgacgatttcgcgctcgcggacgctcagcggctcctgacgctcctcgcggggcgactcatcggccggctgtacgattttgcggcgcacgcagtcctctgaatcgtagatcgaaaggacctcgtcgtaggcgccgagcgtcacggcgtcggtcatcgccagctgcagggcgacgcaccgcatgccctcgcatccggtctgcgcccgcagctgctgcggcgtacagagtcccagcgacgcgggattgacgatcaacacgtcgggccggtggcgcgaaagctgcgcgacaagctgcgagatatccccgatttcgagaatatcgacgttcgccgcaggcatccggtgcagcagggcgataatgccgcagcgcagtatagccgaagattcggcgacggcgagtttcagcgccttcatcggacgcctcctttcgcaccggacgaccgtttccgcgccccctccccggaccggacgtcgtccggagtctccccggcctcctccagccgtttgatggccggaatgaacagacggtcttcgatgtcgttgtgcgaagccagatcgcgttcgcaggtgaagatgtcaaaaagcacgccgttcagctcgttggtgcttcccgaaggataataacggatgatgatgcgcttcagttcggcgagcttggcctcgacctgatcgtgatgacggcggaaaacgtcgatcgaatacccttcgggacgctctccggcaagcagggcttcgacataggggaaaaccttgcgctcctcgtaatccatatgcttgtgcacctcggcgacatactcgtcgaagaagcgcaggatggcgaaggccacgtcgttgcggctgcagtcgatggcctcgatcagcttgcggcgaatgcccggcagccggaaatcgaggaaatagtcgtgggaattgcgcagatagcccaccagcgctccgaccgaaacagcgccgggatcgggagcttctccgtcgatatgcgtattgaccacggtcaggaacgtcccggtatcgaccccgctgtcgcggcagacttcgccgatcgtcttgtcgccgaagcccagcgcgatgccgaaacggctcatgacaagcagtacggggtagcggtcgcagaccagatcgcacatgcggtcgtcggcatcgtatcgtccaattctatacataagattctcaatatctgcaaaattaacgattcatgtcaggtcccgcaatacctaatttcaggtattttaccggccgtcagcggtttccgatgtcggtataggtggtttgcagcatcgtacggcccacgtccatcagggcgggagatgtctctgaaaccgctttcccgctcgtggcgtcccagacggcttctcccgaagcatcgaccacgccgaagccgtcgttgaaggtgtagtacgcgaacttgcggggggggtcggggcgaaaatatccttgctgtagtcgaaatcgtcgtgcgcgacctccagctgaccgaggatcgtggcgcagatgtcgatctgcgaagcgtactcctcgaccacgcgcggcccggcgacggcgccgcccgtccagatcatcgggatgcggtggcgcagcggctcgttgtaggacagactgcgcggccacgggtagccgtggtcagcgaccagcacgacgagcaggtcgtcccatgcgggcgaagccctgagtttgtcgatcatgcggccgacgcagtcgtcggcgaaggcgaaggcgttcagctccctgtcgtcgaacctgctgaacggcacgtcgaacggccggtggctgctcagggtcagcagtcccgccagaaacggctctcccgtcccgctctgcgcgatcacgcggtcggcgaaccagtcgcacatcaccgcatcgtcatacccccagtcggagggcggcgtatcgaaccgaaggtccctctgccagacgagctgctgccagcccgtggcatacatgtaggaggcctgattggtgaaattgagatcgccgccgtagacgaaactcgtggcgtagccctcgcgggccagcgaccgggccaacgacggcaggctgcggctcttggccggaagcttcatgatcgacatgcgcgtctgggccggaaatccgctcagcaccgccacttcgccgcggtcggtgcggaacgaattggcgaaaaagttctcgaaccagacgccttcgtcccgcaaccgccgcatattgggcatgacgggccggccgtcgacgtcggcatccatgaccgtgcgggcgaaactctccagaataaccaccacgacattgggacgggtcttcgtgagcacgcgttccgaaggtccggacgcagggccgttgccgcgcagggcgtcgaatttcgccgcgcgcgtctcttcgtcaaagaaggggtattccgaagcatagtcggtatggtcgccgagcgtcgtcagaaacgaaaagacgggattcgtcgccgcatggttcaggaacatgttcgagctgaaatagactttcgagacattggcgaccgatgcccccgtaccgccgcggatcgccagaaaatcgcagcccgcaagcagcagcaggccgaagctccacggcagtgcggcgcgccggcgcaggggttcgccgtcgaaaagccccaccacgcggcggtaggtccagatcatcagcgcggcataggcggcggccagaagcgtctgccgcacgccgagccagaaatcgacgctcgccatggcctccttcggatcggcaaggtagatcaggaccgtcgaatcgagccggaatccccaatgccggtacagttcgacgtccacggcgaagatcgcggccgtcaggacggcgatcagcacgaagtaaacgttcagcacgcgccgccatatccgttcgggaagccgcacccagagcgacgcgagcgtcagcagcagcggcagggcggcaacatatcccgcgacggtgctgtcgagcgtcaggccgtgccacaccacgccgagccactcccccgcggaagcctgcgccgcatccgcggcatagtaggccagaaaaacgggtttctgcaccgccatcagcagaacggtcgcgcagaacaccccgaaaacaaaagccagtttcttctttaccatacgagcaaaataatgcacatatacgccgggagcgataccgctccgcagccgggcaggacgccgcggcgcatactgcaaccgcaatcccccttcctaaggagattccgccgccgggaaatccggtccggaaccgttcgatccgggaaatcgtcctgcggaaaagtcctccgctcgaaaaatccggtccggaaatccgtcctgccgggagcaaccatccgccggaatcgtccaaaccgggaaccgttcatccggaaaataatccgcccgaaaagtccggttcgggaagtcgttcggccgcaggaatcaccccttccggattatccggccgaaaagtcgttcagagcggacaggcattcagtctgcgaatcacccgtccaaaaacacccggcccggaaaaccgcatgccgggcactccctaaatcttctcgccgtaggccagatcgccggcatcgccgatgcccggaacgatgtaggaacgcgaagtcagctcctcatcgacggccgcggcccagatcgtcgtggcctgacgcggcatgttcttactcacgtagtcgatgccctgctcgctggcgatgacggccgcgacatgcgtatatttgggcgtgccgcccttttcacacaacgcattgtaggccagcacgagcgaggagccggtcgccagcatcggatcaaccagcagcaggaccttgtcttcgaggtcgccgcacgagatatactccaccttaacggtgaacttaccgtctttcgtacttttacggtaggccgaaacaaacgcgttctccgcatcgtcgaagtaattcagaaaaccctgatggtagggaagaccggcccgcagaatcgtcgccacgacgatccggtcatcgatcgtctcgacggtcgcttcgcccagcggagtctcgaccacgcggggcgtataggacagctctttcgaaatctcgtacgccgtgatttcgccgatacgctccagattgcggcggaaacgcatcgagtcggtctgaatcgacttgtcgcggatctgcgcgatgaatttgttgagaacggtgttctgactgttcagaatatgcaaggtcatatgggtatgaggtttggtggtcaatagaggaaattgttgaacgggtagcgtccggcatggatctcgcgcaccatgccgtagagatccgtgcggaacttctcgatattggtcttcatccgggccgaaaggaagatgcagggcgtattggcacgcgcgatccagctcttcttcagatcgtcgagcgaaagattctcacgcgtggcgggcgtgaggtcgtcctcgtctttcttgacataagtgtaggcatcgaccttgttgaagaccagatagacgggcttgtcgccggcgccgatgtcctgaagcgtctgcttcaccacgtcgatctgctcttcgaactgcggatgcgaaatatcgaccacatgcaccagcagatcggcttcgcgcacctcgtcgagcgtcgatttgaacgactcgatcagctcggtcggcagtttgcggatgaacccgaccgtatccgaaagcaggaacggcaggttgtcgaagaccaccttgcggaccgtggtgtcgagcgtggcgaaaagtttgttctcggcaaaaacctcgcttttcgaaatcaggttcatcagcgtcgatttgccgacgttggtatagcccaccagcgccacgcggaccatcgaaccgcggttggagcgctggaccgccatctgacggtcgattttccgcaggtcctccttgagtttggcgatccggttgcggatgatacggcggtcggtctcgatttcgcgttcgcccgcgccgccgcgggttcccgtgccgccccgctgccgttcgaggtgggtccacatacccgaaagccggggcagcatgtactcgtaattggccagctgcacctgcgtcttggcataggcggtctgcgcccgcgacatgaaaatatcgagaatcaggcgcgtacggtcgaggatacggcacggcatcgccttttcgatattgcgcgtctgcgacggtgagagttcgtcgtcgaaaatcaccacgtcgatctcctgctccttgcagtagccggcgatctcctccagtttgccgggacccacgtaaatacgggacgaaggctgcggaagccgctgcgtgaagcgcttcacgctctcgatatcggccgtctcggccagaaactccagttcgtcaaggaattcggcagcctgacgggggtcctgatcgtcacgcacgacggcgaccagtacggcacgttcccggccgtcggaagccgtcccggcattcggagtcttatttctgttttcttccaattcgtttttcaaattttaacgttacacatgcgccgcgctccggaatccggcgccgcacaccccggaggggagcaaacactatgctacaaataagggtatccgccggaagcaggataccctatttattgtcacggagcactccggtcacgccgaagccctttcatccggttagttctgcacgcggaaatcaacgggcagggtatacttcacacgtacaacctgattacgctgttttccgggactccacttcggcgacttgttcagcacgcggatcgcctcttccgaaagcgaacggtcgggggtctggagcacctgaatattggtcagacggccgtccttctcgatcacgaacgaaagcaccacgcggccctgaataccgttctcaagggcgatctgcgggaacttgacgttctgctgaacccagttgcggaaggtgttgaggtcgccgccctgaaacgagggcatggtctcggcgatcaggaacggctggtcgtcctcgatggtctcctcgacgacgtccacctgctgaatcacctcggtattctcgtcgaactcggcgaagtccacttcggtcgtgatcttcgtgtcgttggtcaccacctgcagcaggtcggcgataaccttcacctcgaccttcttgggaggttcgggcggcttctggtcctgacgggtaatctcggtaatctcctcttcgaccggaccgtagttcaggtcgactttctcgatacggtgttccttcggcgtgtaggcaaaagcggcgataaccagcgcgagagccactacaaggccgatttcaagcaaaagaccccgcttgttctgaaggtctgctttgggtgatttcttaatttccatttatttgaattttaattgttcggcaaagtcaaaaatcacgcacaggcatgctatgcaccacaaatatatggataaaaattcaaaaatgcgccatcccgcacaaaaatctttattttttacctacttttgtgccggaaaacagctcgcaggagacggaaaaatggccctttcggaaacgttatacgggaagaccccggagcagctcgccgccgtgtgcgccgagttgggaatgccgcgcttcgccgcgaaacagctggcccgctggctctacgcgaaacacgtcgaggacccgatgcggatgagcgacatcgccgcggcccaccgcgcgaagctggccgaacgcttccgccccgcattcaccccgcccgcgcggatcaccgagtcggccgacggaacgaaaaagtacctctaccgcacgcagcagggcgcatggatcgaatcggcgtacattcccgacggcgagcgggccacgttgtgcgtctcgtcgcaggccggatgccgcatgggatgcaaattctgcgcgacgggacggcaaggactgcagcactcgctgacggcgcccgaaatcctcaaccagatcgtctcgctgcccgaacgcgacagtctgacgaacgtggtcttcatgggcatgggcgagccgctcgacaacacggacaacgtactgcgggcgctcgaaatcatgacttcggagtggggcttcggctggtcgccgacgcgcatcaccctctccacggcgggcgtagcgcccgaactgcagcggtttctcgacgcgacgaaagtgcatctggccgtaagtctgcacaacccgtttcacgaggagcgggccgcaatcatgccggtcgaacgggcatggccgatcgccgaagtcgcggccatcctgcgccggtacgacttcacgcaccagcggcgcgtgtcgttcgaatatatcgtgatgagcggcctgaacgactcgccgcggcatatccgcgaactgtgccgcctgctggacggcatcaagtgccgcataaacctgatccggttccacaaaatccccggatctccctacttctcgcccgacgacgaggcgatgatccgcttccgcgacacgctgacggcgaaggggatacagaccacgatccgcgcttcgagaggcgaggacattcaggccgcctgcggactgctgagcaccgcggcggcggagaacgggcaatagagcacggttcttgcacgttagccgtaaaacaagatgccatgaaaaaactgatcttcgtcctgttgctagcactcggagcgggtgcggcgcagggacaggtaaaattcgaaaccaaatcgacggacgccgtgcgcgaaatggcgatcaagagcggcaagctggtcttcatcgacctctacgcctcgtggtgcccgccctgccggatgatggaacgcgaagtcttctcgcgcaaggatgtcggcgacttcatgcagcagcgtttcgtcgcggccaaatacgacaccgacaaacccactggcaaggagctgatgaagcgttacggcagcggagccattccgctctatctggtcttcgacacgcagggcgagctgctgggacgcatacaaggcgcatcggctccgaaggagttcatggagagcgtccagaagatcatcgacggctcgaagcgcaggtaaccgccgccggaccggaacacgacgtcgaaccgggattcgacataggaccgggacacagcgtccggcgcggattcggctttctcgcaatgaaaaagacgtacccgtagaactcattgtacttgcggtacagctcttcctcataacgctggaacgccatcagcccttcggcggtgctgtcccccggatatttcgccgcgaacagctcccgcgccttggccagcggcgcgaaatagtgttccatccagcaggtctccggcaggacgaaggccgcgaccggaagataccccgcccgatggatctgggccaccttgttgggtatcgtatctatctcaggataggcgtctacccagaaatcatggatttccgtcggacgttcgtcggtaaaccacacgctttcggagaccgcgagatagccgcccggcttcaggtattcgcgccactcgttcaggccccgctcgaagccgatgttgtaaatcgccccctcggaccagatcagatccagctccccggcgcggaaaggcagggcgtccatcgaaccgacgacgcccttcacccggtcggcgaggtgcagtctccgggcgtcggcgttgaaacggtcgatgaatcccggaaagaaatcgagacccgtaatacgtcccggcgcatgccgggccagcgtcatcgtctgaccgcccgtcccgcagccgaggtcggcgatcagggattcgtcggtcaggttgtcgatgaaactcagcgccttgagggtcacttcgggatttcccggcccctgccgttcggtattcaggaaaaaatcgcagatcagattgacgtcgaatccgtgaatggcgttattttcgttactcattgtcttgaagtattgcggcgtacacgcaaaggcatggcaatgcctttatcgtcgtacgcagattaaaaaaactgaaccaattacatgaaaattacccccggagagagtccgggagcgaacgaaaggacgatccgtacggcgggtacgaatcgtttacaacaccgaatccgatttatggagggtcttaatcatggcacaaagatagtcaatattccgaataaccgccctctttgccgaataaaaagccggatgcaggaccgaaacaattccgtgacgcaactttcacagatttatgaagaattcatttcggcagcccgcacccggctgtaacaaaaaaaggacgaagcgatgcgggatttcatcgtgccgctcaccagatcgcagggccgcgccgcccgtccttatggaatcaaccccggcaaacggcacggcaacgcccggcgaccgcaggccgccggataatacattcgcctcaaaatagattgttcgtgacattatgacagggttgatagtttgaaatcacgcccctcatagacataaaaaaggggcgcatttgcagctctttcagtaggtcataggaaaccatgatcagaagctgtcctgcgcccttgtcgccctgcttgccttctgcaagcaggacataacaaggactgacaactattataccctgatctcgtaaatttcctatgtttactgaaaggcataaagagttgtttaccctttatagtatgtccatcggctatgccgaattattcaaatgcaaaattagcataatttttgtcaaaaaattaaataaaatctaaggacaaagatagaaaaacattttaattcctacgaattcataggagcaaaaataatacataccgtctgttatttgcataaaataacttaagtgaagcatacaaacgatacattattgcgttcagtcgcaagtcgattgaaacaaatccggatcgagcgcgggctaacccaagaggtagtaaccgatcgaaccaaagtgaatgtaggtttgtatgaagttggtactacgaatattacaatcgtcctgctgacagtactctgtaatttctataacgttactttagaagaatttttcaagggtattgaatatgaaaaggcgtgaagattcatttttttgtgaaaatgagttaaaatggccaaaagaaagcaacgccgcgacgaagaattattcaaaatggttattcaacgtataaaaaatttacgtgaaactcaccattatacgcaagaatacgtaaatgaatacaccggcttggatattccgcatcttgaaacaggccgggattttccgtcgctgacgacaatagctatcctttgcaagttctacaatataactatcgtcgaattcttttcaccaatagattatccggcaaaggaataaatcaatcatacgaaattcacagccagcgcaccatatcctacttctgtcaaatgtgaatcattttttctaaaatacagatgatttgaaacccacaaaccccatattggtagatttgattgcccggcgactaacggaaatccgggaacagcacaatcatacgaaagagtatgttctgcacaatacgggtttgggtatttccggctatgaaaacaaagtaagattcccctctttggagtctatcgccaaattctgcaaattttacaatatctcgcttgagaaatttttcgcggggataacctatccggaggagccgcaggaatagcggcatccacaaattgccggaatcgttatttcttgggcgtatagaccactttcttggtctcgaagaactcctcttcgaagaagcgcgcaatgtcgtagacatcccaccgtttgccggtcagcgccagctcttcggccagatcgccccccttgaggtagagaatgccgttgggcagggtaccgcgctgtccgcgttcgagacggttccagacccagttcacgaattcggacatggccgtaacggcgcgcgaaacgacgtaatcgtagcgttccggaagcgtttcggcacgcgcgcagcggggttccagattccgcagacccagtcccgcggtcacgccttcgacgacggcgatcttcttgcggatggaatcgacggccgtgaaacgcgcttcggggaagaggatcgccagcggaaccgacggaaagccgccgccgcagccgacgtcgagaatgcgcgccccggcgtcgaacgcgcagaccttggcaatagccagcgagtggagcacgtgacgcaggtacagctggtcgaaatccttgcgcgagacgacgttgatcttcgcgttccagtcggcgtaaaggtcgtacagcgccgcaaaccgctgccgctggcagtcggtgagttcggggaaatatttgagaatcagttccaaatcttgacttttaatccttaaatcgtgtcatcgttcgtcgccctgcgcgatcagtttgcacatctgctcgcgggcgcggtggatctgcgtcttgacggtgcccagcggcagggtgagcttggcggcgatctcctcgtaggagtattcgtcgaagaagcgcatgacgatcagcgtccggtaacgcggcgtcagccgttcgaggtaatgctcgatctgggtccgctgctggaggctgatgacgctctcctcaggggtcggggccgtcgaggggggcgacgagaaacgctcgtcgatcgacaggtcgtcctgacggcggcgcacgaagtcgatgaacgtattgcgggcgatggtgtagacccactgtccgaaggtatagtcggtgctgtagcggtgcaggttgatataaaccttgatgaaggtctcctgcagcaggtcgtcggcgtcgttcaccccgcccagccgctgcacgaacaaccggtggatagcgtcgcggtagcggttgaaaaggtattcgaaggccgtatcgtcgccttcgagcaccagttccaccagccgccggtcctcggcgacgatatagtcggctatctccatacgcggtcgtctttgcgcatcagcatcacgctcagcgccaaggcccagagcggactcagcaggtcgtagacgaaatagcggcccatcatgcccgattcgcccagacggcgcgcgatgcgccgcacctcgatcgccacgatcagaaagcggatcaccagcagggccagcgccgcgatcttgaactcgaacggcatcaccgcagccgcgcagacgaccgtcaggaagaagagcgagcgcgatcccagctcccactggatgtagttgcggaccgtctgcggatagaaacggaacgccgagccgtaatagcgcagctggctcatccaccagcccatgccgccccacgtcttttcgcgcagcgaagcccgtggcgagaggatgacgctcacgttgtcgcgcgtcatgaccttctgcatgaagaggtcgtcctcgccgatgttcatattgaggtggctgaagccgttggccccgaagtagatgcgcttggtgaacccgaagttgtggagcgtgccccggtaggcgcggcgccgcacggcacgggcgagccagtcggccgagtgcatcatgcgccaagcgcgcatcatgtagttcgaaaagccctttttgcgctccacgccgcagtagcccacgacgatctcgccccgcgtgaagcccttggccatgagcgacagccagcggtcggtctgcgggcaggcgtcggtcgaagtgaagaccatatgctcgtggtgcgccgacttgatgccgacgttgagcgccatcttgcgcgaaatcgggaagcgcgggtcgaggtggatcttggtcgtcacgatctgcgggaacgactgtttgagccgcacgaggtcctcgtagaaatcggagtcgtggcccacgtagacgatcaccacctcgaagtcggggtagctctgggccagcatcagcggcagacgctcctcgacgaacgaataatcctccgagaagagcggcacgaccaccgacaccggaggttcggcgtcgagcaccgcgctgcggcggttgttcttgtagccgggaatccggccgtaaacgaaaatatagtagtacagctgcacgccgaacatggccagcacggcccccgcgagggcgatgccttcccagccgtaacatgtcagaagcgtatcgaaaaattgcatacaggcgaaatatgcgcaaaggtacaaaacaatttagaattcagaattcccaaatcagattattttatgtatttttgccgaatatatgagcatgaagtttacattacagcataaggatccggcgaccaaagcccgcgcaggcgagctgacgaccgaccacggcgtcatccgcaccccgattttcatgcccgtgggcacggcggcgacggtcaagggcattttccaccgcgacgtgcgcgacgaagcccgtgcgcagatcattctggccaacacctaccacctctacatgcggcccggcatggaggtcatcgaaaaggccggcggcgtgcaccgtttctcgacgtgggaaggcccgatgctgaccgacagcggcggatttcaggtcttctcgctcgcggcgtgccgcaagctcaaggaggaggggtgccacttccgttcgcacatcgacggatcgaaacacctcttcacccccgaaagcgtgatggacaccgagcgcacgatcggcgccgacatcatgatggccttcgacgagtgcccgcccggcgacgcaccgcgcgaatacgccgccaagtcgctggcgctcaccgagcggtggctggaacgctgtttcaaccgctaccatcagaccgaacccaaatacgggcattatcaggcgctgttcccgatcgtgcaggggtgcacctatcccgacctgagggcgcacgcggccgagaacgtgaagcagtacgacgccgacggatacgccatcggcggcctcgcggtcggagagccgaccgacgtgatgtacgaaatgatcgaagtggtgaacgccatactgccggaggagcggccgcgttatctgatgggcgtcggcacgccggtcaacatcctcgaagcgatcgagcgcggcgtggacatgttcgactgcgtgatgcccacgcgcaacggccgcaacgggcagctgttcacggccgaaggggtcatcaacatccgcaacaagaagtgggaggacgacttttcgccgatcgaccccgaaggcacggcgttcgtcgatacgctctacacgaaggcctacctgcaccatttggtgacgtgcggcgaaatgctggcggcgcagatcgcctcgctgcacaacatcgccttttacctgcggctggtggggatggcgcgcgaacatatcgccgccggggatttcaagccgtggaaggatgcgatggtcgcaaaactgacacgaagactataaaagcgtatgaaactgcgatttccggggtttaagatcttagaccgctacatactcggcaagttccttgcgacctacttcttcgccatcgcgatgatcatcatcgtcgtggtgctgttcgactatgtggagaagatcgacgacttcacggagctgcacgccccgctgcgggacgtcatcttcgactactacctgaacttcatccccttcttcatcaaccagttcagcggtctgttcaccttcatcgcctgcatcttcttcacctcgaagatggcctaccagaccgaaatcgtggcgatgctttcgggcggcatgtcgttccgccgcctgatgtggccctacttcctcggcgcgctgatcatcggcagcctgtcgctgacgctcaacctctggctgatccccatttcgcagcgacacatcgtcaatttcgaatcgcagtacatcaagcgcaagcagaacaacaagttcaaccgccatatctaccggcagatcgagccgggcacgttcgcctacatccgcggctacaatgacgcatcgcagcaggcgtcgttcctcgcgctggaacactactacagcggcacgatgacccgctcgctcgaagcgtccgacgtgaagttcaaccccgaaaccaaacgctggaccgcgccgcgctacaccaaacgcgaattcgactcgctgggcgtcgaaaaattcgagcagttccgcaacctcgacacgctcatcaacctcgaagtgaccgagctgggcgagatcaacgacctgatacagacgatgaacatcacggagctgaacgaattcctcgaccagcagcgggccaaaggttccgacgccatcaacatcatcgaggtcgagaaacacgcccgcttcgcctatccgctctcgaccttcatcctgacgctgatcggcgtgtcgctctcgtcgcgcaaggtgcgcggcggaacgggactccacatcggaatcggcaccggcctctgcttctcgtacatcctgttcaaccgtttcttcgaggagttcgccaagagcggcacgctgccgcccggactggccgtctggctgccgaacatcatctacctattcatcgccgtctacctctaccggaaagcccccaaataagatgcagcagatcgacgacatagccgccgaagtacgccgcggagcgcgtatcggcgacgccgaagccgcacggctctggcgcgaagcccccctgtggctgctgggcgagctggcgacggagcgcaagcggcgcgtgagcggcgacaaggtctacttcaaccgcaatttccacatcgagccgacgaaccgctgcgtcttcaactgccgtttctgctcctaccgccggccggccggaagccccgaagcgtgggactacacgatggaggaggtcgagcagatcgcccgcggccggcagggcaaaggcatcaccgaggtccatatcgtgggcggcgtacaccccgaccacggactggaatactatatcgacatgatccgccgcgtcaaggcgatactgcccgaagcggcagtcaaggctttcacggcgatcgagctgtcgtacatgatccgcaaggcgggactctcggtcgaggagggcctgcggcggctcaaagaggccggaatggaggccattccgggcggcggcgcggagattttcgaccaagagatccgcagccgcatctgccccgacaagggatcgacggacgaatggctcgaagtgcacgaaacggcccaccggctcggcatcccgaccaacgccacgatcctctacgggcatgtcgaggaactccgccaccgcatcgaccacctgcggcgcctcagggaactgcaagacctcacaggcgggttcaacgctttcatcccgctcaaataccgcaatttcggcaacccgatgtcggagatcggcgaggtatcggtgatcgaagacctgcggatgctggccatgagccgcatctatctggacaacgtgccccacatcaaggcttactgggtgatgtacggcaaggcgacgaccgaactggcgctggccttcggcgcagacgacatagacggcacgatcgacgacacgacgaaaatctactcgatggccggggccgacgaccggcgcccctcgatgagcgtcgaggagatgcggcgcatcgtccgggcggcaggctgccgcgccgtggagcgcgacacgttttacaacgaacttccggaccggtaggaacagtccgccccgcccggagaaaacagacggacacaaaacacaactcccgcgaaaatggagaaactgacatattactggaagaaactgcggcagaacaagctggcatacaacttcgtgctgatagcggcgatcattctggcaatggccgtcacggcgcatttcgtcatgcaggtcggcacgcgccacggcgcccgccgcatcgtgcccgacttttcgggcgtgaagctcgacgacgcgcagcgcacggcccgcaaatacgatctcgaactgcatatcaacgactcgctgttcgtgccggcctacgaaggcggcatcgtcctcgaccagctgcccgaaggcggcgtggaggtcaaacccggacgtacggtctatatcacgatcaactcgttccggcagaagatggtgcccgtgccctacgtggcgggacgttcgctgcggcaggccaagaacatgctggagatcgcaggactcgaaatcggcgaactgatctaccgcgccgacatggcgaccaactatgtgctggaagagtactgcgaagggcgtcccgtcatccagaacagcaggattcaggccgaaatgggatcgggcgtaacgctctacgtgggcgtcgagggcggtttcggctcgacggtcgtgccgcggctggtgggattcccgctcaaggaggccaaaggccgtttgtgggagctggggcttaatgtcggcaagatcgacttcgacgaaggcatcaacctgctgaaccagaaagacgcccgcgtctacgtgcaggttccgacggccgaacggagcgccgcgctgggttcgcgcgtcgatctcaaactgacactcgacgagaaaaaactcgcccagcaccgcgccaccgccgagaaacaggcccgcgaagccgccgaagagcgtctgcggctcgaacgcgagcgcgccgactcgctggcgcaggccgaattcgaacaggcggccgccgccggggaagaacagcccgaaatcctgcccgcaaccgataacgacggatttttcgactgatggccgacgaacgctacataaccgaggacccggaactcgacgacgggcagacggcggacgaggacggcgagggcgccggactctacgagcatttcgccgtggtggccgacaaggggcaggctccgctgcggctggacaagttcctgaccgtacgcatggagaaatgctcgcgcaaccgcattcaggcggcggccgactgcggcagcatactcgtgaacggcaaggccgccaagtcgagctacaaggtcaaaccgctcgaccgcatccagatcgtgctgccctacccgcggcgcgaagtggagatcatccccgaagatatcccactcgaaattccctacgaggacgacgacctgctgatcgtcaacaaaccggcggggctggtcgtgcatcccggtcacggcaactacagcggcacgctcgtcaacgcgctgacctaccatctgcgcaacctgcccctgtttcaggagggcgacatgcgcgcggggctggtccaccgcatcgacaagaacacctcagggctgctcgtggtcgccaaaaacgaacagtcgcacgcgcggcttgccaaacagttcttcgaccacaccatcgggcggcgttacgtggcgctggtatggggcaatttcgaagaggacgaagggaccatcacgggcaacatagggcgcagcccccgcgaccggcagaagatgttcgtcttcgaggacggctcggacggcaagcacgccgtgacccactggcgggtgctgaagcgttacggctacgtgacgctggtcgagtgccggctcgaaacaggccgcacgcaccagatccgcgtccatatgtcgtggcagggccatccgctcttcaacgacgaacgctacggcggcgaccgcatcctcaaaggcacgaccttctcgaaatacaagcagttcatcgaaaactgcttcgccgtaatgccccgccatgcgctgcatgcgcagtcgctgggcttcgtacaccccatgacgcacgaggcagtccatttcgagagcgaactgcccgacgatttccgcgcgctgctcgaaaaatgggacacctacgccgcggcgtcgaaggagagcgataacggataagcggcccggcagcggtctttcgccataaatccgaggtcctgtccccgaaaacacggtaccgcatacgcgcggacatcgcatacggagaaatccgaagacacccgccgcaccggaaagtacagccggcgagctttcacctgctgccgcagagcggcagaaagcccttccagagggaagggtttgggaataggaacggatttgcaaatgccgcctgcggcggccggaaagccatacgaaatagacagttacgaaaataaaccacgctttgtttctaccgaccacgataaaagaggtccgcgcacgcggatgggagcagttggacgtcatcctcttttcgggcgacgcctacatcgaccatccggcattcggcgcggcggtaatcggccgccttctggaagccgaagggtatcgtgtagcgatcgtgccgcagcccaactggcgggacgacctgcgcgacttcaccaaactcggcgcgccgcggctcttcttcggcgtctcggcaggatcgatggattcgatggtcaaccactacacggccaacctgcgccttcggagcaacgacgcctacacgcccggcggcaaggcggggttccggcccgattacgccgtcaaggtctacacgcagattctaaaacggctgtttccgcacgttccggtggtcatcggaggcatcgaagcctccctgcggcggctgacccattacgactactggaacgacacgctcaaaccctcggtgctggccgaaagcggcgccgacctgctgatctacggcatgggcgaacgggtcgtgcagcaggtcgccaaagccatgcggaacggctacaacgccaaactgctgcgcaaactgcggcaggtggccttcatggccgacaacggttacgtggagcggctcgatccggcggagacgatccggctgcacgcctacgaggagtgcgtgcgggacaaacgggccttcggcgagaatttcaccatcatcgagacccagagcaacctgatggagccgacggcgacgctcatcgaggccgtgggcgaccgttatgtggtcgtcacgccgcccaacacgacactctcgaccgacgagctggaccactcgttcgaccttccctacgagcgcgcaccgcatccgcgctacaacggcaaaggggatattccggcgtgggagatgatcaaacactcggtcaatatccaccggggatgcttcggcggctgttcgttctgtaccatatcggcccatcagggcaagttcatcaactcgcgcagcgaacgttccatcctcgcagaggtggagcgcgtgacccggatgccggacttcaaaggttatctgtcggacgtgggcgccccgtcggccaacatgtaccgcatgggcggacgcgaccgggaattgtgccgcaaatgccgccgcccgtcgtgcctgcatccgaagatgtgccccaatctggacaacgaccaccgcccgctgctggcgctttacgaaaagatccgggcggtgaaaggcgtcaaaaaggcctttgtcggcagcggcatccgctacgacctgtttgacgagagtccctatctcgatacggtcgtgaaataccacacgtcgggacgactgaaagtcgcgcccgaacacaccgaagatgccgtgctgaaactgatgcgcaaaccgccgttcgcgctcttcgagcggctgaccgccgatttccagcgcatctgccgccgcgaaggactgccctaccagctgattccctacttcatctcgtcgcaccccggctgcaccgaacgcgacatgcgttcgctgtcggagaaagtcctcggcaaactccatttcaacctcgaacaggtacaggacctcacccccacgccgatgacactttcgtcggtgatgttctacaccggagagaatccctatacgcacgaaaaggtctacgtcgcccgctcgcaggaggagaaacggcggcagaaatcgtatttcttcaatgaaaagccgaccggaaacccgacggttccggaacggcgcacaaccgccagacaagaacgcgccccgaagaattatcgcccgaacggagatcggacgtcggccccccgaccgcgaaaaggggaaaatccccgtacaataccggggataaagcgcaaaaggtaagtaatccgcacgccgcacggcctgcagtcgggcaccgacgtacttcaagcctattcatgcggattttcagcgcatttcagcgacgaggaaagccggagcgtcgctccggctttcttcatactattcggtgttattttacgccccacttatcgccaacgcgtttcagcaggcgggagatgcggctcacctctttgtcatcgtcccccgtcaccggagtccggcgtatcagccaccacaaaagcatataaaacaagacgagaaagaccgaccagacaactacatatatcatatctctctattttcaggacaatccggataaacagcggctcatttcaattccggtgaagcatcgaacaagagaccgaacaccgatcgcgccatctccccgaaaagactgcgcccgtaaagctgtctgtatttccagcgtgacgaaagcatgttgcaaaccagcttcgcccgtctcttgtaaacgggcaatccgctgacatgccgtttgttcgccagcacatcggccagcactctatccatgcagcggcggtcaaacgacacccccggattcgtcagagggacgccccacacatccacggctatggcattcatggtatccgcaaaccgggagaaacccaaatcgtcgcagatcctgtaaaaataattccagtctatcgcattctgctccttcccgacgaacaaagcccagtcgagcagatgccgcagggtgatcccctcgatcaggaagtgaaaaaagccatgataggtaatatacagtgcattgaccgtcggaaacaatgtatggaatctgtcctctccgaacggcacgaagtctccgccttttacggcgtcctgaaagattcgctccaaccgcctgatatcgctcttccctttgaaagaggtcagataacgatggttttcgaacatgacgccgttcgagcagatatggttgtgcttataatccagccccgaaaccttcatcccccggcatcgggcgatctcgttccccttctcgaacccttcgggcagaaggatgtcgatatccccgcattcgcgctgcaatgggaaaggataataacgggccaatccgatccctttgagcaggatcagccggcagcccgcatcggtacaaagagccgcaaaacgggctgcttccagcatttgtctcttcgaccgcgagacgatctgctccgccccgtacgcccactgcaacctcaatccccggcccggctgcaaatccggagacaaccgccggacgctctcccacgccacggccagcaccccctgctgcgccgcctgcccatatacccggctccattccggatcggacaacgccttatcgagagccggttcctgcatatttatcgccgcggcaagcaaccgcagcaacacccggtcggcaggatttagcgtcataggaaatcatggattgctcccggcaacgggaattcagtaaatcgcttcatactgaccgacaactttacgccacgtgtaacattcattagccagccgttccatactgccggaagtatcctcccggctttcggcagcaagagcggccagttcctccggagtgctccaataacaggctttatgaccggtcgtctcccgattgtaacccacatcgaacgccagaatcggagcgccgcaggacatggcctccacaagcgacgggttggttccgccggcgctatgtccgtgaatataaaacaggcactgtttccggagcacgaagagttgttccctgtcatagaccggatcgacaatatggatattgcagaacttgccatatacggctttcaactcccggccgtaggcactcagattccaattaccgataaatacgagcgggatattcgttttagagaacgcctccagaatcagatgacaattgttttccggctcgatccggcagatagtacaggcgtatgctttcgccccgactccgaaggaggcgaggatttcgcgctgccgggaaagatcgaccgggatcacggcatgatccccgccataggcgatcagaaccgacggcttacggtaagtctccgtgacatagtcgcggatcaccttattgtccgcaattacgacatcggcaaacttgacagcgatccgctccgacaaacggagaaacttgcgggcccatttgccccacttgtcccgcctgtgctccaagccgtcgatattgacgacgatcctcttgcggaacagcaaccgatacaacggcaaaaacagacacccggaaacgcccaaaatgagcacgacgtcgtacccccggccgacagtccggatcaacgaccagatatcatacggaatactttgcataccgtttgcatgcaacggcacgtattcaagccgggcgtttttataagctttcaatctggtcggataagccttgccactgcaaaaaacagtataatccacatcttcggaacaacactctccgatgaggttttccacaagggtttcaaaacctccgtatttcgccggaacgccgacggttccgataactgcgaccttcttcatattaccgttttatccaaatagcgaattgctttttaaaagcttctatttcacttcggttggtataccgaaaataatccttgtctgtaaaataatccgcagaggaatgcagcccgataaccgaagcgagcgtttcggcatatgccgggacatccttgccggacaagatgccgaagctgggaaattcggtcagcattctcctgaaataaggcacgtcgctcgcaaggatcggtttacgaaaatagaacgccatttcgagaattccgctctgtgatgttttgcgatacggcagcgccacataatcggtatgttcataaagatataccaattcatcgtcctcgatatgtctgaggacaatcttaaaagcggccttgtccgacggctgcacccgatgtaccgtcccatcgaaatccttccctgcaataattacgttcgctttgcagcgaagttccggctccaaactattcactgccgatataaggatatcgattcccttgtcataggttatattcccgaaaaacaagatattcactttgtcttccgcaattgcggaaacaatatccgcccccagacggcgaatgtcgtaattcttcgaaaaacaatatttgaaatgaggtacgaacagccggttaccccgatagccgtattcctccagcagatcgttcgtccgttgggaatgaacgatgaccgtcgcaaatcgttcggagtatacctttcggaagcatcgtttcaacccggcattgtcatccgcattttgcgcaatcgcttcatggatatcgattatgcttttctttgcgagggaaacgatatacatgaacggcaagtcgatggagttaccgtaagccagataaacgaagcaggcttttttgtttcgcaggacaaagcagaacaacatcaggtagttccgcaacagacaacatattttgcgcagcctgtttcccttgtactggtgtaaaaaaaagggcctgccatcgttttcaccggcataattcgacagtacggaaacatccagtcccggaactgcagacaaaacccggcaaaaagcgtcgttgtaataatgcattccgcaatgcattccgatgtaatcgacaagatataccttcatgatacatttttataatccgatgagcatattcaaatacttattgtcaatgcgttggattaccttcgagacaagaactgggatataaatcccggacaggacgcacaatacataaaaatacggatacgttccctgcatccccagtttattatatatcatttttattccgatctgaataaaaattccgagtaaaaaaatctggtacgtataattgcggaacgacacgaatacgttattcgacaaattccggtcgaatttaccggccaatccccaacataacaggcaaccggacaatgacataaccagcgttacgacatcctcttcaaccccgcctacccaaaacatcgcaacatacaggatcaggcagattgcgatgcagcacggccgttttatcgccgtctcaaaacagttattggcagcaatcaatagccctagaaaaaagaatatgaaaaaatggacggcacggttgaatgcaaatactccgctcatatcgcccacgggaataaagaacaaaccggcagcgcagcacaaacaaagcaaggacaaccaattgtttttcaatattctcctatacacttccaacaaggaaaagtaaagcaggacaactgccacgaaccacatctcttgcaacgggccctcgaatggccgaacaaaggcactgacaaaggatttcaacgataaggtgaccggcctctcgactcccccgacatatactttgagaaaaaatgcgaataccgtaaaaaatagatacggaatgccgagcctcttgaatttatcggtcaatgtctttctatacgacgcccctttgtcgatgcgggtaatgtaaaacagatagccggatatcataatgaacaacggcatatgaaaagaataggctaccttcttgagaaacaacgcacattcatgacaatcagcatcgaaagaagaggcgaaagccgtaacagagagcggggaatgaccgataactacccataacatggcccagccttgcaataacagcagccatgtaatctttttccgagggggggggagatcataaaatcagaaatttctatattcaattaaacagggattgtatccacaaactttttacaacacaaaaatcacttcggtttgaaagcattcgtatcgacaggtatttccgactcgtcttgatatctattacagataaaccggaccggaacgccagcccaaacctgatagggaggaatgtccttgttcaccacagaacccgccccgataacagcaccgtcaccgattgtcaccggttttgtgaatatggcattgcttccgatatatacattccgcccaatatgaatttcaccccggtaataggcatgctctttcaaattccggacatcataataatgagaaagcagaatacatccatccgtaattgtcgtccccttaccgataaaaatatcttctggatgaatcgtatcaatagaaacccgaccgatccgaactacacctttttcaatagaaacgcctaaaagcttatatatcttcgcacgaaaaaagccggtcatgggaaaaatcccgcaaaatctaaaacagaatatttttatataccgactgagtctggaattataatccgcccttttatagttttccataccgacactacctattagtaaacaataaaactctcaataatctcttctgctgatccggggtatcttttcgcattaacaggatcggaagccataacacggcattgcataatctataagaccagaaaacgaaataattataatgcttccggatgtatagcaacttactgcggaaaatattctcaatgcgattgaaagaccacaactttgtattcgacggatcacttccgccttcgagatgtattatctctggcccgtttatgagaagcctttcatatccggctttcgacatccgaaattgccagtctacctcctcgcaatacatgaagaatacaggatcaaaagtccccaattcgtcacaaaccattcggggaacgaacaaatccgctccggtgatataatcaacgggggtaggctgttgtaccgatgccggacagagatggttgcgttttttcagaaaccgtaaatacttacccaacacttctgcgatctcacccctcggcgttataaaccgaccatatgaatgtatgtttttttgattttggtctttcaaaacagctcctacagcgccgattttccgatccggattcttttcgcagaaatcgaagaacagcttcactgcgttattaagcaaaatagtatccgaattcaagaaaaacaaatatcgccctttagcttcccggattccgaggttattcgccctgccgaaccccagatttcggtcgctgtaaatatactttatgcgcttatcctgcgcaaaaacctctttgctgccatccgtcgatgcattgtccaccaatatgatctcgtattcgacagtcgaggtttgcgcaataatgctttcaatgcagtccgaagtcaatcccagcgtattgtagttaactatgataacggatacgtccatttacagaaacttgttcttaataaacacattgggatcagatcgcccgaataatggataaaaaactaatgcaactcgcaggcaaccttctgcatacaaagtatcattattcaagaataccaacaaaatcagaaaagacaggagcatatatctcatataacttcgaatgtcattatcctgaacaagagaagtcttcttatataaattgtaatatagtcccaaatatatcaggacaaggacaagtcccccacgcgctaaagttccccatattcctatatctgccagatagaatgccccgccaaaaaacgtatgaaatccctcatctcgaaaatgcacagacaaattaccaaagccaagaatcagattttgctgaatatacggcataacggactcaacagaattcactcgtgcaagagtagaggaatcgctacttttttcccacttagtagcttcaatcaaagaatcgacaagtttatcattaaacgaaaggagaacaagagctccaatcaaaggtaaaacgccaagcgccaagcgttttaacgagattcctttcatcctaacgtaataaatcgcatatataatagccaacaatgcaacaggttgccgtcctttatttacaaacaacaagtaaaccattaaaacaaagaatggaagataattctccttttgagcaggcttttttacaaaacggatcaaatagaaaacatatgaaataatcatcaaactggaacacacggtaagtttaagaccttttaccagatcttccaatgccactgtctccacaatattggtagtcaccaaatactcctgaacagttaaatggttcactccgaaaacaaaaaaagcaataatagaaacaactgcaataattaaattgactttattaatttgccgaagtaataaactatagtcatattttatattatacaaaaagaaacccaacaaaatgaaccatagataacgcaacgaggcaaaccccataaaaaatgactgcccgaatatctcttggctttgaaatgctgcatatataggaaaaacgaaacaatacaatccggcaaatatcgcaacagtagaaattcgtttaaagacaagataatagataaatgcccctaatcctaatatcagaaacaaataatgacatccctgtagaagaggtatactacctaagaattccaaagctcctataaaatctagaagcaatatataaatgagatatttcatacgattctacaatattcaccacatggattttggatgatgtttttatcatctcttagacaaaagagtctgtcaacaagagtattattcctgcacttcttaccccaaaagaatttgggaaatatccacaaatacctacgaagaataactttttagcaattatcaacacaagccaattcatcaaatgtaaatcgctccgattttggagaagtaactattcccgatttataatgtccgcctaatatcaaaacaacaggcatctcacattggggaatcttagcaatctttttaaattccttctctctgcgaggggtccccggataaacattttaaaacaagacgcaatatgattcaaatgcaaccccataacaaaattcatcgcatataaaccgccgtcaatcaacgcctgatacctctcataatttcctccaaaataattgcaattaaccgttacacaaatgagaaccgatgcattatcacaccatccttgtgtccctaactgattatccaacaattttcttatcacatttttatctctaaaaacatgaatacgagaagcctgcctgttacaggcagatggagtataagaagctatacggcaagcctccctgatttcatcatcggttacaggatcatcagaatattcccggacactaacgcgacttgcatagaactcttctattatctttttatcgaaacaagaaggttcagatacctttttagtaccacctattcgggaagaagacatcgatttcttatttttttctaaaaaatcacaaatacgattacggctctcttcatcacgagtggcatatggactcttaagatactcagcaagaatattaattgctacaatacaaactttattaagaccgtattgttcaatatgtttatcaagtagccttattaatctaacagccttctccccaccaaaaattcttgccgaagggaaagacattcccttctctaacgcatgcataacaagcataatctgcgcattcgacttatcttgcgtaatgaccggattaattagagaatgctttatataaaaatgaaagtcagcaaaaaaacaatataaaagttttgcagaatcaacaaattgaatgattatttttttcatatcttaaaaaacgtcatcagattttccattaacaaattgtaccgttcagcaacgaccgtcgccattctattccttatcatatttttcaattctgcccgttgaaaataggctttttttatatctagcaatatatcccgttcatctttcactttcatatctcccataataggataatctaatgtttccaaaaacaggccattgaatttacgactatatgccattggatataccgccacttctgatgaaaaagcagcaatagcagaatgcatgcgagcccccataaaaaagtccattcctgcgatataattcttagcaacaataggatcaaaaaagagtggggctaaaatcaaattttcattacaatattcctcgtaaatatcataggcaacagcgtaatcattttcaagtccacgctctccacccactacatgaggaatcaaatgcagttttacatccttctttgacagaaaatattcaacaattcctcttatcaaacattgataattcgatttcaaaccgaactgattgtccatcgtataaccaccattccaaagcaacgcagagatattcaaaccgacatggatatactctttattaaattcttttttttcatatggcatgaaaaaagcaacatcaattatctcggtaacatccagattcggcaataaacttttgacataatcagcactctgtttatcacgcaccatcacacattttgcacttcgaacggcgcccattgcctttttacgaagacccgcatcgttaaatgggccaatcgtttgtggtaaaatacaaagcgggatattaaacttttttgccagtttgtattctgaataaatccacttaaaccgcttttctccataaatatccgcaaaactatccccctgtcctatatccaaaataaaatcagcgtccttatatattttacggctggaaaaatattgacgaggacggatcatgttttccaaagcatttcttttattataaaaagaaatattttgacaacttttatacttaagttcgacaccaccacaatgaaaggtatgattttcagtcaacctaaatccactatccggaagatagaatacatgtgggatattactcttatttaataatttatctataaggtacataatagacaaactcagtgcaacacaccctcgattgccattattcactgagctgttagataatattatattcataccttagatttcaaagttttatatcccgacttaaaaatatgcaatccatcaaggatatacgtacgcatcccgatatattttacacacccagccgttttaaaccagtccttaattttattattcttcaaatattcatagcgtaatttccctgcattatagtagcgtttcagatcaaaaattatgtctcccttttctggataatattcggaacaaaattccaagaatcctttgagattcaaaaatcttcgatatgcataatagatatataaatctcctccaaactcctgtttactccactcttctgcaatcctaactgtcgcactttgatgctctcttcttttcaccaacacttcgtcaagaaaaaatagtccattctgcattgttgcaatcaaactaatcgcaatatcatatggtataaatcgacaacattcttcataatgtccataaattaactccttcttaaaggctatagtcatccccatataataatgaaactgacagaactccgggatggtaattaatttaagagaatttatcttcctattgggaaccttcgcatgttcgtaaattactccattattgttaaatgataaatatgccgtagaaagcaattttatttgagggttgctttgataaatagcaataattctttccaccttattatcataccatatatcatcctgatcagcaatcaaaataagatcgccactagcttgtttgaatccattttggaaatttactataaacccttgattttcctcatttcccagcaacaaccaattagcaagtgaatgtctgttgataaaatcttgacaaatagctcttgtattatctgtagagcagtcatctataataataacttcatcaacaggaactgtttgaactcttattgattctaattgatcatatataaatttctccccattataagatgaaatcacaacagaggttttcatttttttataaatttacgtaccgcatttacaacatactgccgttccccaatatccaatcccatgatatagattgtcaaaccagtacatatgatcgacaatatcaaatatgacagtattaaaaaaaagttatcggaatctaaataatttgcaataacacaagataatccccaagctataactccagtgatcaacgatctaaaaacaacagatcttacgaaataactgacatccagatttaccagatttttaagtaccaccaatctaacatacagggttattactatgattataagcgatataaaatagactacgatcggctgaaatccaattcttaagaagaaatatgataaagggatattcattatctcaaaaatccccgtataaagttgaaacttttttatatttccatttgcatttgctgccgtcgccaaaggaagagaaaaagtattgattgtcgaagccaataatgcaatccgacaaaaatcagcagtatattcaggaacagtttttagccaaattacaagtaaactttcaattcttatacatactggcaacataatgattagcagcaaaaagaacgaaaactttgcacttttgaaaatcaaggagaaaaaattacctagatctcctgaagcataggactgtattattcgaggattcaccgcaacttggaaattacttacaaatccgcgaaccgttccgctgacttgctccgtcaaccctcgcgcggcatttaaaacaggcccgaaaaatatattaaggataatgccaactatttgaccatttaatgtcattgagatgctactaaacaaattccagccggaaaaagacagcatttggcgataccaatatttctcagtgcaaaacttgaaccttgtttctttaaactttctattacaatatatcttataaagcaaactggtaatcaacaccattaaaaacaccatcaatccatataatatcaatttatctgttttaaagaaaaataacaaacagaccgctataaaatgtagaatggtactaatgattccaattgttgcatactgcttcatatgctcatgtgcaataatactagcagtatatggaatttgattcaaagaaagtatagtcgaaaatatagtaaactgatatacatagttggccgctgtcattctgtcctgaggtatattcatatgcgtattcaaaaaccacaaccccaatgtttctgcaacgataaagatgagaattgcgaatatcacatatattacaacagaagccgaaaatactttatttagattctcatgatttccccgtcctaattcaaaattaatgaatctttgggtgccaatcaacaacgtagagttcaagaaagtaaagataacaataatacttcctacaacattatatactccaaaatcgataatccccaattgatttagtaaaatacgagaagtaaaaaaccccacaatcatggagaacaacattctcacatacaatgttgcggtatttttaactaaactttttcgttcagtcgaggttgccaaattgtttttcaattttcacaaacactatatagccagtaccagttatttactgaacgattagacattttcgtattctcatctcttgcccacttgcacctaataaatcaagcagatgtattcagttctgcaccgaataattactgtctaatttttgtacatgctttggtagtatttttcatactccccggaggtgatctggtccatccatttttggttctggaggtaccagcggaccgtcttttcgatcccctcctcgaactgcaggctgggctgccagcccagctcgtctttgagtttgcgcgagtcgatggcgtatctcaggtcgtgacccgcgcggtcggcgacatacgtgatcagcttttccgaagcgccttcgggattgcccagcaaccggtccacggttttgacgatcacccgtatcaggtcgatgttcttccattcgttgaaacccccgatgttgtacgtgtcggcgaccttgcccttgtggaagatcacgtcgatggcacgcgcgtggtcctcgacgtagagccagtcgcggacgttctccccgcggccgtacaccggaagcggccttccgcggcggatgttgttgatgaacagcggaatcagcttctcagggaactggtaaggaccgtagttgttcgagcagttggtaaccagcgtcggcatgccgtacgtgtcgtggtaggcccgcacgaagtggtccgacgaagctttcgacgccgagtaggggctgtgcgggtcgtacttcgtctcctcggtgaagaactcctccccgaaaggaccgccgccgctctcgcagcccgcagggtcccccgcggggcgggtcagctccagcgcaccgtacacttcgtcggtcgagatgtggtagaacagcttgcccgcccaattgccgttccaatgctcccgcgcagcttcgagcagcgacagcgtgcccatgacgttcgtacgcgcgaaggtgaacggatccctgatcgagcggtccacgtggctctcggctgcgaggtggatcaccccgtcgatgccgtactgccggaacagttcacgcatcgcctcgaagtcgcagatgtcgcccctgacgaaagtgtagttcggccgctcctcgatgtcccgcaggttggcaaggttgcccgcataggtcagcttgtcgaggttgacgatccggtaatcggggtatttggtcacgaaaagacggaccacatgcgagccgatgaagcccgcgccgcccgtgatgaggatagtgcgttgcatatattcaatattaatgaattattttcttttcttatataaaatcctttttatataatctttcattcgggttttcagagttttttcccgccaagacccgtcacaataatgcatggaataggactccttgcttctcgtcgcaggatcgcctgcgaatatgcttgagctatacaccatcatatttccgtcaaggagctgatcctcgtctttatagcggaatccatacttcgttgccaacatcgccataatgcccggatttatgacatctacatataaggacccgtcctcttgaataaaatgccgggagccataataatccaaacattccttaataaagggattagctttcttggaggctatcaaagctgccaacaatcccagtcctgcgacaatatccccatcccgtcggacgactccggcatcgtctatttgatgaataccttgtgataaaaaataggtcggatgatattcaacagaagaaaaaaagtcccaagataaaaactcatcaaaaggtctgaatactttgacatcagtatccatataaataccaccttccgtataaagggcaaaatgtctgatataatctgaggctaaagaccatttcctcatttgaatagcctcctttacccacggaacagaatctatatcgaaattcgtttcatcccaacgctttatggtataatccggcaagatcctcttccaagagtctatgcaatcctgaaccggggggggtatttccctcctcccaaccatacgaaatggatgattttaggtatcataatgatttatttttcaatttgtttcagacagtagatcatggactccctccagtgggggatgtccatctggaaggtggtcttgattttggttttgtccagcaccgagtaggccgggcgtgcggccttggtcgggaattccgacgtgtggcaggggatgatgtggcatgagtcgtgacccgcggccgcggcgatctccgtcgcgaagtcgtaccacgagcagacgccctcgtcggtgaagtggtacacgccctcgttgcccgcgtagcgttccgactcgatgatcgagaagatcgcaagcgccaagtccccggcgtaggtcggagtgccgatctggtcgaagaccacctgcagcgtatcccgctccgaggtcagacgcagcatcgtcttcaggaagttgttgccgtattccgagtagagccacgccgtgcggaagatcagataccggcacccggacgccatgacggcgcgttcgcccgcaagtttcgtgcgcccgtacgcccccagcggcgagggcgtaccatcctccgtatagggcgtatgggccgtgccgtcgaagacgtagtccgtcgagacgtggaacagcgtcgcgcccgtcgccttagccgcagctgccagattgcccgcggccttgtggttcagcagctccgccgtcggttcgtcctcctcggcccgctccacgtcggtgtaggccgcgcagttcacgataacgtcgatgcgccgctcctcgaccgttcgcaggacggcagccgcatcggtgatgtctagttccgcgacgtccgtaaaaaggtagttgtggggcgaaacgccgcccagacgccgcagggagcgcccaagttgtccgttcgctcccgtaatcaggatattcataagtttaataaaaaggaatataatctccggaaaattcgtatcgtagatcgtgtgtacgttcgcctatcttttttgcgggaaccccaccgacgatcgtgtagggagcaacatcttttgtcactacggcgccggctgcgacgacggcgccttcaccaattgtaaccccgtgcaatatcgtcgttctcggaccgagccatgcccgatcctctatgacgacgcgaaaactgtcatctgaattgcatttgaaatccggatctctatggtcatgctgctctgtccaaatatgtacttctgtagagagattgacattcgcacctatcgatattccatttcgcgcatctaaaaccgcccgatccccaataatgctcccctctccgattttcagtttataaggctctcttatctccgctccaaaataaataacagctttaggaccgatttcgaccagacaaactttcttataaagaaaatcccggattatatgtgacggaatataagcgatttggaacaagttataacggaaatatccactgcatagaagtttgattcgacctgtaatgcctcctttttgttgcctaacgagggggggggagacggattctgacgactgaaattgtcggttccttttgaacctgtaataaaaagccatcggaaatatcgaggagactagtattatttgtttgaataacactaggaacagaaatacaaaaaataaagtcgtcataaactataatagttcgtattatagtcgaacagctccccggcctccgacagcagcggatgggcgctgtccttgggcgagaggattacatcttcgggggccagacgccagtcgatgcccagcgaagggtcgttccatgcaatggcgccctccgattcgggggagtaggggttgtcgcacttgtattggaacgtcgcttcgtcgctcagaacggcgaagccgtgcgcgaagccccgcggaatgaagaactgacgcttgttgtcttccgtcagctccaccgccacgtggcggccgaacgtgggggagccgcggcggatatccaccgcgacgtcgagcacgcggccccggaccacgcggacgagtttcgactgggagtaccgccccttctggaaatggaggccccgcagcacgccgtagcgtgagtgcgattcgttgtcctgcacgaaccgcacgggacggacctctgcgtcgaagcggcgctgcgagtagctctcgaagaagtagccccgcgcgtcgccgaaaacctccggctctaggataacaacgccctctatggcggtaggaacgactttcatagtttaaattttaagatcagttgaccgtataatcgaccggattgaagaacaagtatttgtttaacacttgtatataacagcggcaaagcgacaccacaaactacgtatggaacccaccagatatttatccggtccgggataacagggaatgcggacaaataatcaatgccataaccatatatcagaatctggagcaggctgacaactttgaatgcaagaaaatgcagagccatgatagctaaagacgcatttccggcatagatcataatacgcgacagagtcggtagattatgtatgtatacagccaaagtataagtaaacagacaaccgacggccgatgcaaaatagaaaacagggagcggcgggaaaattgaactggcgattgccaccgttacatttttatattgcaagaagagcagtaacatcagtaaaaccccgatgctccatatattaacaggcatatatcgctggtatttccgaaacattcgccccatatataaaatagcggtcaaataacactcgttagataaaatccgtcgtataatcagaatatcaatctgctgtatctcagcatcaaaaacagaacaaaggaccactgcgaacaaaatccccccccctaaaattatatcggaatatcggtctgacagccgtttggaaatccagactccgatcatgaacaagaaggaaacgatgaaaagacttctcagaaaccacaatgcccctaacaattgttccggagtaacgcaagaacaaaaatatttaagacaatcgaaatagtcctgtcgcgtatacaaatgactggtcagaggattataaaaatgagctctgaaaaagagattgtgcaacagcatgaaaacgattccgtatccgaccagcggaaaccacaaacttttaatttttttccaaacgaataaaagtttatcgtctatatatttatccttgaagaaatatccggctacgaaatagaaaacagccaaatgaaacaggtatacaaagttatgaaccggagaatacgctgtatgccctgcaacaacaaaaataatccccaatcctttcatgatcgagaatacatggctattttctctctgatcaatcgttgtcatcgtttatgcttccggttcgtcgaggagtttcaaaaggtattgtccgtactggttcctgagcatcggctcggcaagtgcgcgcagtttgtccgccgtgatccacccgttgcggtaggcgatgccttccagacaggcgatcttaagtccctgacgcttctcgatgacctccacgaagatcgaggcttcggccaaggagtcgtgcgtgcccgtatccagccatgcgaagccgcgctggagcgtctgcaccttcagctcgccgctttgcaggaaacactggttcacgctcgtgatctcaagctccccgcgggccgagggcttgatgctcttggccacatccacgaccttgttcggatagaagtacaggcccacgactgcgtagttagacttcggatgggcgggtttctcctcgatcgaaaggcagttgcccttatcgtcgaactccgcgaccccgtagcggcccggatcgtcgacacggtagccgaagaccgtggccttgccatcctcctcggccgtacggacggcctcgcgaagaagacccgtgaaaccggaaccgtagaagatgttgtcgccaagaacgaggcacgcggaatcgccgccgaggaaatcctcgccgatcagaaaagcctgtgcaagaccgtccggagatggctgtgccgcgtagtcgatacgcacgccgtagtcggagccgtcgcccagcagacgccggaaacccggaaggtcctccggagtcgagatcacgaggatttcgcggatgcccgcaagaagaagcgccgagagcgggtaatagaccatcggcttgtcgtagaccggaagcagctgcttgctgacccccttcgtgatcggatacaggcggctgccgctgccacccgccaaaatgatgcctttcatattataccgtattgctttatttccgaataatcctttaaagaatattatgctgacaaccgcccggccggaagattccgccgtgcgaaattcagaccttgtccattacctgctgcaaccagaagaaaatcccggtacggctgatgtgggttttgtagcccagccgccgcatcgccctcatgaatcgcgtatcgcggcagatatgccactgcatgaaatggtagagaccggaagtgaccagcaggcttacggcaataaccgcatacagctggacggcgatcgaaaagcccgaagcttccagcgcccaccagcacaacacgacaaacatattcacccccagaatagccagtgtcgtcgccacatgggagcatccgaggtcgataaacatatgatgcaggtgtgtcttatcgggacgaaacggagaggtccctttcaatatgcgcgtcgacatcacccgcagcgtatcgaatacggggaccgataataccgccagcgtaaaaggcaccagtcccacgttcggatccacatacgcagcggcccgcgacccgttctgcaggatctcgattacaaaaaccgacatgacaacgcccatgacaagcgttccgccgtcaccgatgaacattttcgacgttttgccgaaaacgttatgcagaaaaaagggaataagagcgccgaccgagaccacggccaagatggtcatcgactcttcgccggaaagaaagaagagcgtgccgaagatcagacaagccataatgcaatagccggacgagagaccgttgacgccatctaccaaattgatggcattgataatacctaccgccgcaacgaccgtcaaaggcactgcataccaataagaaaaccggccgatgttccacaatccatgaaaatcgtctatacagtaaccgccaacgaaaatcagcaataaaacgacgacgatctcgatcacgaatcgcaaacccggtgaaagactcagaatgtcgtccatcgtccccgtatagagcatcgccatcatggccataattacgaccggcagaccggagcaatcaacgacggagctcatacatccgatcgcaatcacgactccgaaaaagacggcgactccgccgaggacaggaaccggcgtacgctgcaatttgcgggcatccggattatcgacgatatttttcagcagagcgatcttcaccagacggggatgtatccagccgaccaacagaagagctatgaagaagggaataatgattgtgtagcaaagaggcgttgccataccaattatttattttccgagacagcaggtagaatatgtggaatatgcagagagtataaacaagataaagattcaagactgtcattatgcaatatatcgctccgtaggagcagattgccagatatcgattcgttcggcgacatgacaaaccacacagcagacgcagcagaagcgatcgtcgtctgaacagaacggagtccggccgtaatcgtacatgaagcgggcgattcgccatgcaaggtgagggtccggatcatacgcattgcccagaaccgccgcatcgtacagccggaccaaagtatagaggtaattttcgtcgaagttgccggcgtcttcgggaaccggcaaagagttccggaagtattcgaacgaccgatttaccgcacggtcattcgttttgtcgaggaacgcatacgaatagcggttcatcacgccgatacgctccagcgcaacatccggcgacacgccgctccagctgccgtcccggttcatttcggcgatccagccggcaatctgccgtttcagaagcagcagatattcgtcgccggcgtccggaccggggtaaagcaagtcgatcagacaatgacaaacacctgtccggatcaacaattccgattcgtccggtcggagagaagagcgcttttcgttgccgccgagacaatcccggacgagttcgtcggccattgcgaaacagacctctttctttttcgagacgtcgccggacacggtcccgcaaacgagcgtatacatggcatggaccatccggcagcgcagcgcagcatccgactcgcggcggcagcgttcccgcagcacaccgaacagcgtatcgatcctttgcagccagattctccgggttccgaactcaccggccggcgaatcgaacgtcaccagaccgcacaatgcggcgtacgcccgcgccaaccaaagcaggcggacattcgtcgcccccgcaaaatcggcattcagcagggacggcagcgcttctttcaaatattccggcgtcataacttccaaaaaatcaatctctgcaattcaggaaaaccgaatccggccatcaaatcttttcgaccagcgccgagggaatggaggcggtagccaccgccgtgatgccgtcgatcttgaccacgacccgtttcccgcgggaattcttcacccgcatgagctggccctcgaccccttcgaatacgccgcccgtgatccgcaccttgtcccctttcgacaaggcgacctcttcgggcgacatgaaaagcacctgttcgtcttcattgcccgcaacggcaataaaattccgcatctgctcttcgggcacgatcataatctgattctcaccgttttgcgggtgcatcacataacgaagcataggtagcttataggttttcaattcgtcgatgacctcacgtgtcgaacggatgaaaatatagttgtgcacggcgacttcgcaagcccggaaaaactgtcccttggagttccggcggcgcacaacccgtaccggcacaaaattctcgatgttcagtttgtcaagatactccttcgtcgaaagttcccgctgataggtcactcgcagaacataccattcggcagctgtatccggactgttcatcatgcttttcttagactaaaaaaggtcggaaagagaggtatggttgtaaaaaaagcattccacggggacatcgaaaaccatttattgcaatgattttcaatcacttacgcgcctcccataagaacactttcacatttcacagtacagtctcttggtaagagaccttaatgttgagggcaaaagtattaaaaataaaatatatgcacaaatcttttgttctttattttcgtatgcagtgagtttttctgcgttaaaaaaggattgattatcaacgccttttttatttttagtccaaatactgatacaattaggccttcgtatgccggtattgtacgatcggccgtgaatcgctgaagatttccaacgcagatcttttgccgatttataaaaacaagatatgaaccgcaagccattcttcttaatatcaattcattactgaccacacacatctcttaccaagagatattacacatacaatgaagctattatgctccggttcgcctgatcgacgacggagctttcgagcgaagccagatagatctgggtcgttttctccgaagcatgtcccattcccgcactgatgatcgacaacggaacgttgtgattccgggccgtggtcgcccatgtatgccgcgaagtataggacgacagcggcatctccagtccgagcagttcggccagccgtttgagccggcggttgtagtatcccagagcagtctggtactgggagaatccccggaccgggtcctccgcattcagcaaaggaaaaacatagtccgacgtgcgggtaaccggcgcatagcgttcgatgatatcgcccatgcagggttcgatacggatcgtaaggcgctgtcccgttttgcggcggacatagcatatcgcccctccggcgatgtcctgcttgcgcaggaaggcgatatcgacgaacgccataccccgcgcgcaatagctgaaaataaaaatatcccgcgccagcgccaaggagggggagtgttccagattcaaccgccggagccgtatgacggtctcttcgccgacggcgcgcttgcgggtacggtccacgccggtatatacattccggaaaggagaactttgcgacacgatgccctcccggaccgccttgttgaaaacggcacgcagcacccgcatataaaaagagacggtattgcgtacaatccgtctccgccgcagccagtcgtcgtaccggcttaccagttgttcgtccagcagtgagaacggaatgtccgctccgttcaaaaatccggcgaagctgttcagcgtccgccggtaattccgcgccgtccccaatcttccgcccgcccgaaggcaggcgatctgcttttcgataaaggcaaaaacggtaacccgcccgaacgaccggaaccgtccgacaacatccggaaggccgtactccacccgccgggcttcgaaatccccgataatcgcacgaaacaggcacaaatcgccgtcgatctgccgctggacgacagctatctcgccgtcgagcccagcaaagggaacgaccgcccgctcccgcagggcgtcccattgttcggggaaaagacgaattccggtagttatctgccgggattggcatttatggcagagttggtaatagattacccccgccttaccctctaccgtcgaattccggaattttacttttacttttgccatacatacagttttttagttgttcatattttggcccccggaaccttctccggcgccgggcggcttcagcagtcatctctttcgcaggatcgtccgacaaaactaattatcagatcggataaaaaggctgaaaaatatgccatacgggccacaaaagacgtttcgcccgaatgtatggagacaaaaacgccccggcaacaggaagccggggcgttgacggtattatgaagactgcgctatgccagcatcggtttcaggacgccgaacagcacgagcgcgatgaccagcgtaacgacgatattgaaggtctgcgccacaaggaacgcccatagagcgttgcggttttccttcgaaacgatctctttcaggcgggtgtcaagccccacacagacgaaggccagcgagaaaaagaccgtcgagaacatcttggcgacgcccggttcggcgagtttgcccttcgcatcggccgtaaacaggccgttgctctgcaggatgctgaaaaccagcgaggccgcgacgaagccgatgatgaatttcgggaacttctcccacacgatgcccagcgacggagcctgagcgcccttttcgccgcggcgggtcgagaggtagagggcgatgaagaaagccacgacgccgatcagcacgttctgcgccgccttgatgatgacggcatgctggttggcgacctcgccgacgatcgtactcgacgccgccacgcccgacgtagtgtcgatcgtaccgccgatccatgcgccggcgacctcctgcacgacatggggatcgtcgaaaatcaggggcagaatcgtatttgcgagccacggcatcaggtagatcatcggcaccacgacgatcagcaccagcgaaacgatgtaggagagtttccggtcgtcgccgcccgccacgcgggccgccgtgatacacgccgaaacgccgcagatcgagacgccgctcgaaaggaccatcgccgtacgctcgtcaaccttcatgcggcgcgacacccaataggcgaagaaccacacgacggcgaccaccagacaggcctgcgccagaccgaagacgcccgacttcatcacgtcgctgaaaaggatcgtggcaccgagacatacgacgccgatcttgatgtagaattcgccctgaatcgcgggtttcatccactccgggacccgccacacgttgcggatcaccagaccgaagagcaccgagaagaaaaccgactcgaagccgtaataggagacggcgggaatcttggccacgatctgcgccagcagggagacggcgaaaaccaccgcgagcgacggcagcaggcccctgagcgggcggcgcaacagaagacacccgacgtaaagcaccgccagcacgacggcgaagaggtaggcgatattgctccatgcggcgccgccgagcagcgtcgcgggaaccttgggaagtccggcgggcacgatcgccgcaagcgccagcaggggtatgctcacccagactaccacccagtcctcgacccggaattgttccatccattttttcataaggcgttcggtttttcagtattagaatatgccggaaagcatcagcgcaaccacattgcggccggagacgtcgcgggcagcgtaatcttcgtaggtatagttcagctggcagcgcaggtacttcaccggctgccacgtaagggccgccgtgtagttggtctggcggctcgaactgcgggcggtgttttcgaggaaggtatcgtagcgcacggcaggcagcagcgtcttcgtcacgcgccacccggccacggcgtaccagccttcgctgtcgaggtcgcccgtcgtgccgcagatatattcgccgcgcacgacgaccggaccgcggtcgtagcaggctccggccccgtaacggacgcgcttgaggtaatccgcgccgtattcgccccaatagtacgacccggccagctgcaatccggcggcgggtttcagcgtcaggcgtgccacgatgtccttgctcttgttcttgtccctgacgttcagcccctcgccgttgaagacgccgatgttgtaattcaggatgctgtatccgtcgcggcggaaaaatccgccgaaaagctgcgctcccatgtcgcgccccgtggccgaaagtccgcagagatcgttgaagcccatcagcttgcacaacgacaacgggtactcgataaactcgtacctgagcggcacgtattcggtattctcgatcgaaaagggcagtttgtattcgcccagctggagattcagctcgtcgaacggccggtaacacaaatatgcgtccacgatcttcggcgacgcgaattcgatctgaacgcggtagtcgagtttgggagcgatgttgcccgacaggctcaggcgcacgcgcttgataaagaaggaggacgagttatcgctccattcgtagccggtctggaggtatcccgaaatcgcaggcagggcggccagcaccttgtcccatgcggacgttttggccttgagcgccgcgacctctgcggaaagctccccgaccgtagccgtgcagagcgtatcgggctgttgggcataggaggcgcaaaacagcccgaacgacagcaaaactggtaaaatcaatctcataaacagaatcgtttgggtctgcaaaagtcgcaaattcggcgcaaccgatcaatacgcgaaaatacctaaaaagaacaaaaccgggtccgaaaggcatccgaacgcggcagcgaccggactgaaaacgaacaagaagggccgtttgcgacgcaaatacctcacgcaccggcccggagggggggggcaggcgaacacccgaaaaaagaggagcggacgcttgtggggcagacggtcgtgaacctgcacgaaaatgcgcgcgaggcggtggcgccagagacggcgcggacatcgaggtcgtttcgcgcatcgagaccagtgcgggcatcgagaccagtgcgggcatcgagaccagcgcgggcatcgagaccagcgcgggcatcgagaccagcgcgggcatcgcgggtatcgaggtcggtgcgagcatcgaaattgtctagcgcatcgccgaagagaacgccgcgaccgcaacaaacgacaacggcggggcaatcccccgccgaagtatgaaatatctttaggctgttcttcacgacacgccgtccttcacccccaagcccgacggttcgggcataggtccgaacgttgtgcatccacatcatgcgcccctacgacggatcgcagcgtccgacgacaacaccggcagccgcgttacgcccgtattcggacagataccccgaccaaatcactgcaaaaccgcgctggataggcatccgaagcgcatctgcataccccacttatcggggcatcgggaaggagagcgtccgtgcgtcgaggaacgcatcggggaacggactccagttccacgcctgaccgttcgaaaggttgaagtgcgacccaaggcgcagcgagttgttgtcgatcacggtcacgcgcgaaggcaggttctccttctgaatcaccaccaccgaagtcatcgagacggccggcttgaccttcatcggcgcagcggtccggaagtcggttttccacggcgacatgtgggccagcgagtcgggaacggacatctcgacccgaagcgaatcgggaagcctgaaactgccggtacgggtcgaatcgggccgcacgagccggaaccgacccggctcctgcgccgaaagcgaaaacgccgcgaacaaggcgacggcgatcataaacatccttttcataactttccttctattttctgttgcacttttcctaaaaaacctcccgcagaatccggaccgactgcacggcgctgatggcgtcgaggtggtacccgaaatagaccagcacggcgttgagaaactcgacccgctggccgcggttgagaccgatctccgagagacagcgcacgtcgcactccagaaaatcgcgcaacatgcaggcgcactccctgttcatatagctaacgtgcgcgggccgggttttcgtataaagcccctcacggatatcgaaccagtcgccggaggcgtattcgttgccgggacaaaaccccagaaaccggctcaggttggcgagaaaccacaaatggaaattggccacgccctcgtccatcgagtcgagcgccccgacgcagttccacacgaagtcgaaaagcgcttcgttgggttcgtcgtactccctgacgaggcggtacaaaacctctgccatgaagagcgccatggtcgatttgcgcacgtcgaaaggcagactctgcaagacgaatccgccccgcacctccttgaagcggtgcatctgctgccgcggcgattccagcccctcgaattcgacgggaaacatcggctggaacagcgccagcttcgaaccgcgtccattgcggctgcgcacgccctgcaccatgtaactgcggcggccgccggcgtcggtcaggaggtagacgaccatcgatgaatcgccgtatttgagcgtatggagaactaccccgcgccccttgtacgtcttcaacctactccttgcgtacgtgtaccgtcacccagccctccttcaccgccgtagcaacgggcctgagtcccagtttttcggcgcaggccgtgatcgccggaacgtcgggttccagaaatccgctcatcaccagatcgcctccggcgtcgagcgcggcggcatagaccggcatgtcggccaagaggatgttgcggttgatgttggccagaatgaaaccgtaatgccgtccggcgatgcggcgcacgtcgcccagcatcggcgtaatgcgatccgcgacaccgttggcggcgatgttctcgcggcagttggcgtctgcccagtcgtcgatatcgaccgcatcgacgtgctccgcgccgcatttggcggcgacgatcgacagcacgcccgtgccgctgcccatgtcgagtccccggcgacccgcgacgcccagatcgagcacggcgcgcgaaacgagccacgtagtggcgtggtgtccggtcccgaacgacatcttgggcatgacgaccacctccatgaccccttcgggggcgggatcgtggaacggcgcacggatcagcaggcggccttcgacatcgacggccgggaaattgctctcccatacggcgttccagttctgggtctcgatggcgatatagcgtccctgcacgccgtagcgggcgagcagggcatcgaccccggctttgcagtcggccagccgctcctgcggaatgtaggctttgagcgtcccgtcttcggtttcgaagctctcgaagggatagtcggccagctcggcggtgagtatttcggcctgctcatcctccgaaaaggcaatattcaacgctatatagttcatattatgtaaaatttatatatcttagcccggacaaagttagcgataatctcggaatatagcaggcaaaggatggcagaaaatacgaaaaagtgggaagagacgggacgtcgttaccggacctatatcaaactcgaaaaacgtctctcgcaaaacaccgtggaatcgtacatgcgcgacctgcgccagttcgcgcacttcatcctccgccagtacgacgtcgctccccgcaaggtcgagggaacgatgatcgagcgctacatggcatggctctacgaccgcggacgcgaaaagacctcgcaggcccgctgcctgtgcggcatccgcagtttcttcaacttcctgctggtaaacgatcagatcgagacttcgcccgccgagttcgtcgatacgcccaaattcggacgcccgctgcccgacatcctcaccaccgacgagatcgacagcatcatcgccacggtcgacatgcgctcgaccaaagggctgcgcgacagcgccatgctcgaagtgctctactcgtgcggcctgcgcgtctccgagctgacctcgctgcggctttcggacctctttttcggcgaaggatacatccgcgtcatcggcaaaggcaacaaacagcggctggtgccgatcagcaacacggcgcgggacaagatacagcggtatctcgaagagcggcgcagcgcacgttcgggcgaggagacggtgttcctcaacaaccgcggcggacagctcacgcgcgtgatggtcttcacgatcctcaagcgggccgtcgagcgcgcgggcatcgacaagcacatcagcccccatactttccgccactcgttcgccacgcacctgctcgaagggggcgcaagcatacgtcaggtgcaggagatgctgggacacgagagcatcctcaccaccgaaatctacacccacctcgacagcgaccacctgcgccgcacgctcgaagagcacctgccgatataagccgtcgggagtcaggaggaaaaggcgggtgcagccctcccggacaggataaaccgcatacgcaggcgcaaactgaaccgccgttcgcacggaaaaaaccacactcgcccatagaaaacagcgaagccggggatcgaaccccggcttcgtcgttttacggcgcagagcgtcattcgccctgcacgcagtcataaacaagaatattggcccggcggttgcccgacgatccgtcgcggcacgccacgcccagatagagtttgccgtcacgcaccttcagactctcgccctcggcatagcccgtggtcgtaagtcccgcggcggcaagtcccgccttgtcggcgacggccgccacttcggtacgcggcacgacgatcttgccgctgtagttgaagaccgtgacataggctttcgattcgaacgaatcggcgcccgtctcgacggcgttgccttcgtagaagtagacgtagttgcccgccacttcgtgtccctgatgcgaataggagtagacgtcgttctccttgtccgacccggcgggtaccgaaaaaccgcccagcacgcggcagtcgttcaggtcgcgggcctcgatctcgcgggtcacgggttcgctgcccgccgaaccgaccgtcaccgtcgccgtcatcttcttgagcggcagggccaatgcttcatcgaggtcgaaaatccagaagtagcgcacgcccgacctgcgcgaaccgatgagcaggcggcgcgccccgaagtcgatcgagacctgctggtcgtactgtccgtccttgttgaggaaaaaggtctctcccgcatagccggcgtcggaggtcgcgcccggaacgaattcgacccgcgacacggaccagttgtcgccgtattcgccgcttttgtccaccgaggcgttgctgttgagccagatgtaggtcttgccgtcggaagcctcctcggcgacgatctgcgtgccgtggccgaagtatttgaggatcatgtagtcggtctgcgcgttcagccccggacccgcggcgcggcagatgttgagcgtcgcgccgtcggagccgacctgcgaataatagatgctgccgctttcggtcaggtcgaagccctgcatgatgcgccggggagcgtacagcagtacgtttttgctgtagataagctcatcggagagcggggccgcgagcgcagccgaaggatcgagcggcggctcctgcaacgtggcgaccgtacagcgggccgagtagctgcggtagcgggccgtaatgacggccgtgccgaaggcgcggagcgtcaccagtccggtttgatcgaccgtggcgaccgtctggtcggaagagctccacttgagcgtgactccggcatcggcgggacgggtcgcggcgaccagttggaacgactgcccgacggtaagttccagatccttctcgttgagtttgagcgacgtgatctgcaccgtcctgtcatccgaagagcatccggcgcccgctgcggccgaaacgacggccagcaacagcagagtgaggtattttttcatactgttcgttgttttcatcagttcatgttctcatcgacgaccgacaccgagaaggtgcccttcaggcgcgtcgaaccgcctccgcccgtagtgatcgtattgttcgccgtgatgcgcacgttggccgaaacccggtagcgtatccagagcgtacccgaattgatcgtaagatcgacggggaagtcgtacgagaaatagcccgtattctcgccttcgaaaagcggactgtcgtaggcgcggacatggtaggtcacctcggtattgttgaaggttccgctcttcgcgccgccggcctgccgccaagtctgcccgtcggccgagtactcgatcaggaagaaccccgccgaagaacccgaaccgccgatgctgcccgtacagttgatcttcgtgccggagacgaggtatttcaccggaatcttctgcagccagtaatcgccggtataaagccccttgagataggcgtgcccgtcgttgtagccccagctgttgaccgccgaagccgtcttggcatcggcttcgacgaccgtgatgtaggcgcggccgtcctccgaaaccagactgtgcgacgcggttacccagtcgggctgccgggctttcagggcattgacgtcctcggtactgcccttgacgggacagaactcccacgtcacgggaagcccctcgatcggcatttcgctcatggcgtacaccttggcgcgggccgtaccgatctgcacgccgtccaccgacacggcgaaggccgcatagcccggcacggtcggcgttcccgcaatgtcgagcgccaccgtagcgccgccattgacaagcgacaccgaggcgccggccaccgaaaggccctgcgaatcgccgctcagggtgcagctcacgtcgatcgtctcgtcgccgtaggcattggcgtaggtgaagcagagccgcgatttcgaaggctcctgctcgatgaggttgccttcgacatagggcgcgccgtaaacgacggcgccgtcggcctgcgtgaccgtgatcggatattgcctgcctccgctttcgaggtagatggtcgcggtgcgctcggcagaacggttgtgcgtggccgaaacggcgatccactcgaacgcgccgctgccgacgccttcggagggagaggtcgaaagccatccggcgtcttcgggaatcacggttcgccagctgccgttgcagcggagcgtgatctgcttggacgaggccagacagctggcgaagcggatcgaatccgtctcgcggaccagatagctgtcatcgtcgtcgctgcacgccgtcgtcagcgccgcgcacccggcggccagcagcaaaaactgatatattcgtttcatgattttcatttttcaggttcgcaatcgtttatttcttccagcccggattctggcccagcgcgggattgtcgttgagggccgtggtcgggatcggccgcacgtacttcttatcgtcccacttgcggttcatgcggatgtagcactcgatatagccgctgtcgccgtcggtaagcgcatagtcgccgcccagcacccggtaggtcacgcccggctccgtcaccgggggattttcgcgcacgaagcagacgtcgcccgaaccgtcgccgtccatgtcgtagaccttgcccagctcgcccacatagacgccataccacgggcgttccagcagccgccccataccccagcgcatgtcgtcgtcccaacggcagttttcgagcagcagctcgatgccgcgttcgcggcggatctccaagatggccatgtcggtcgtggtgttgagaaagtattcggccatgtagggatcgtaggccgaaggcatcgcgccgtccaccccggcgcgttcgcgcaggagtttgatcgtggcgttccagaccgtctcgctgaattcgcccagttcggccttggcctcggcgtagttgagcagcacctcggcatagcgcaggatcgggatgctggtggcgcagggagccgtattgctgtccatcgaggtgtcgtcgatgacccacttgatgggctggtagcccgtcacgcagtagccgaaatcgggggcgtagggcgtattgacgttgttgttcctgcgcgtatagcccggatagcggatgctctgcatcaggcggtagtcgcggttttcgaactcgtcggcaaagagggttttctcataccccgccttgtcggtgaaacggctgccgtcccggttgaggtaggtattgacgaactggcgcgtgagcgagtaactgccgtactgcatattcacgaaataggtattgaggatatgcgtggcgttgagcgaagcgtcgtaggcgcgcgcccagatgacctcgccggaggcgacgctctcgctggtgaacagactccggtattgcgtggcgaccttggccggatcggaaaccagcgcatatttgccctcgcccatcagcgtttcgcaggcgtcggcgcaggcccggaggtacatctccgactcgtcggccgtccacggcttgccggtcgagggatcgttcgcgtggtatttgcggaaagtgccttcgtagagacagcagcgggccttgaaggccagcgccacgttgcgggtgatgcgcaccgaattgacttcgagcttggcgttggtgatgcagtgcgtcgaggcgaaatcgaggtcttcgagcaccttgcggatgacgtattcccgcgaatcgcgcggcttgtagagcgcctcgcggtcgttggcgtcgatctccctgtcataccacggcacggccccgaaggtcttgaccttgttcatgtagaaataggcgcgccaaaagcgtgcgacgccttcgtaatggtcgagaatcgcctcgccggccgcagcccggcggaagttgccgaggaagtagttgatgttgcgcaggtcctcccagctgcccgtggaccagcccgactggtcgtcggcgtcgaagttgtcggtgaggtactgccactcgccgcgccaagccatgtagtcggcgcgggcgtcgcccgtggccacggaaatggcggtcgggatcatggtttgcagaaatccgttggcataggcctccagatcgctctcgttgcggaaataggagggagcgttgatcttattggggtctccggcggtcaggaaatcctcgcaggagacaagccccgcggcgaccgacagaatcagaaacagctttttcatcgtttgcatggtttgagaattagaacgtgaggttgagacccagcgtcacggtgcgcagcatcggatagctgtaaccgtcgccctcggtcgtacggaagtcggagtcgcccgcgttgatgacttcggggtcgtagttgtcgcagtatttgaacatcggcgaggaggtccagaggttctcgcccgaaacatagaccttcagccccttgatccgcatcttgcggcagatatgggccgggaaggtgtaatcgacggtcaggtttttcaggcggatgtacgacacgtcctgcatgtagcggtcgttgggcgtggtcagcacgcggttcaccgagctttcgttggtctggtaagccgaatagcggggccagtaggccgtgtcccagttgtccagctcctcactgtagacgttgctgcccgtatgggccttgagcatgtagccgaacggacggttgtactgcccccagaagtaacccgaatcgtagcgtggataccagttcttcttggcgacgccctgccagaaggtcgaaatgccgatgccgttccagttcagattgacgttgatgccgtaatggtagcgggccgaggtgttgccgatgacggtcaggtcgccgtggtcggagagcgtcttggcgccctgatcgatcttgccgtcctcgttcaggtcggcgaacttgacctgaccggggcgcgtcaccttgtcggaggattgcaggaaggactgcgtggcgtgggagtcgatgtcgtcctgatcgcggaaaaggccctcgacgcggtaaccccagatttcgcccagctccatgccttcgtaatagtcgtcgaggttgcccgtggggttgatgtatttggtcacccacgtacgcgaatcccagaccatcgccttgacgccgtagcggaactccttgccggccagtctgaagctgtcgcgccagcctacggagagctcccagccattggtcttcagcgaggcgttgttgcccttgggggccgccgtgccgtacacggcgggcaggctcacgccgacggtgtacatatcggtcgtatagcggcggtaccagtcgaagcccatcgtcaggcggttcttgaagaggtccagatcggcgccgacgtcgtacgtggtcgaggtctcccacgtgagcgagagcggaatggcgcccggagcgacggtgtaggttcccagcgcattgccgatgaccacggtcgaggacttgagggtcatgtagtcgatatacttgtaggggtcgatgttgccgttgcccatcgaaccggcggaaaggcggatcttgaagttgtcgagccagccctcggaccaccccatgaacttctcttcggagagccgccagcccaccgaagccgaggggaagaagccccacttcgaattctgggggaatttcgacgagccgtcgtagcggcagctgaactcggcgaggtagcgccccttgtagccgtaattggcgcggaagaaggctccgacgtagctccagtcgtaaccgccgaccgtggggtcgctcgtcacgccgtccatcagcccgaaactgggcttcgaaggaacggtcagcccctcgcgcttgacggtcagggtgcggtatttcttcttttcgagattccagccgcccaaaagtttgagcgagtggtcgtcgcccagtttgggggtgtattccgcatagatgttgctcgaaacatagttcatgtcgtaacggacgttctggagcgtgctgccctgactttcattgaccgtgatggtcgattcgggtccggtatagccggtgtacatgttggtcacgcgttcgcgcgtgttgcgcgaaaagaggtaagacaggtcgccggagaccttgagcacgtctttcacgaggtcgatctcgacgccgagcttgtccttgagcgtgaatttatcctcctgctggtagctcgtcccttcggcgaacccggcgtaaccgttcagcacggcggcataggtccacgtgccgtcgggattggtaatcaggctgacgggctggccggagtgttcgaccatgcgcggcacgagctggttgctgtagtagagcatcggctggtggtagtccacgaccgtgaagtccatgttgttgttcagacgcagccacgggcggatgcgcacgctgcctttggcccgcacgttatactgcttgtagcgttcgtcgccgacgcggtagatgccgtcctgatcgtaaaagcggcccgaaacgtaataatcggcgtttttgccgccgcccgaaatgctcaggttgtgctcgtgcgaatagttcacgtccttgtagaaggctttggtccagtcggtattgccgaaatattcgtatttgccgttgtcgttgatgcgcacgctttcgagcgagggatccgtactgcggcgggcgagttcccggtaccacgaatcggaatagggcacgatgttgttgatcgtcgaattgagctccttcgaaccgttgtagtagccgttccatgcgttgatataacccgtcgtccactcgtaaccgtcggtcacgaggttgggcttgacggtgcgcgagtggattgagaaactgccgctgtaggtgacgttcacctcgccttcggaagccgacttggtagtcacgagaatcacgccgaaagcgccgcgggcgccgtaaatggcggccgacgatgcgtccttgagcaccgatacgctggcgatgtcctgcggattgaccgtttcgaggtcgccctcgacaccgtcgatcagcaccagcgctccgccgcccgaaccgatcgagccggtaccgcgaatgtcgatggtcgccgcgcgcgaaggcttgccgtcgcgcatcgagatattgaggttggggatggcgccctgcagcgaacgcgagacgctcggattggagcgttcggcgaactgcctgctgtccacctgatccacggcgccgatcaggtcgcggcgcttgaccgaaccgtagcccacgacgaccacctcttcgaggatctgcttgttctcgcgcagcgtcacgtcgagcgtactccgggcgccgacctcctcttcgagggtctggaatcccaagtacatgaagaccagcacggcgctgcttccggaaacggagagcgagtagcggccatcggcatcggtggaggtgcccgtaagggtgtttttcaccagcacgctcacgccggccagcggttcgccctgttcgtcggtcacacggccggcgacggtctgcttccgctgctgcgcggcgctgcgcgcagccggcgcatcggactgcggaggcgcggacagagcaaccaccttgtccttgatcttataggaaatgccggtgccggcgaataccgaagccagcatctcgtcgagcgtcgagccgttcagcgcgacgtccacatggggaagggtacgttcgccgagcgaagtttcataggaaaagaccacgcccgtctgttgggtgaaagccgtcaccacctcgcgcaggggagcgttgtgcagcgacagtttcagatcgtggcgctgcgcggcgaaagcggcgtcggcatcggccgccgcgaacgacgggagcgtcaggccggcgcataacagagccgcacaccaccctttcaggagtgaagtaatcgattttttcattatgtttcagattagaataaaggaagaagtttgttttaaggccggtccgaacggcgggttcggactaaaggatagcaaaagactcttgttccataggctgagcggatttggggttgggttactatttatcgattcagctgaattatttcgaaacgacagcccgacacgaactgcagcagctccacgacgtcttcgaccgaagcgtccttctggaaactgaaattgtagcgttcgccgggtatctgctgcgccccgatgcgcaggcttacgccgtaggtccgttcgatgcgcgcgacgatttcgggcagcgtggcattgtcgagggtgacgaccccgtaacggatcagcagcaggtcgcccacgggcacttcgttgacttcgagcagctcggcctcggcgtcatagacggcctgctggccgggatgcaggcagatcaggttgcggccgccggcgtgctgcagggccacggagccttcggccagcgtggcttcggcgaccggttcgccgctgaaggagcggacgttgaagaccgtgccgagcacgcggacccggaatgcgggcgcggtgacgacgaagggttgtccggcatcgtgcgtgacgtcgaaataggcctcgccgtcgagttcgacattgcggccgtcgatgcggaacgtatcgtcgtaggagagcgtcgtaccggggctgagccagacgtcggtgccgtcgggcatggccacgtgcatggccacggtatcggcgttgtggaaacgatggacgaaaggtgcggtggcgacccggtaggtcatgaaagccgcggcgagcgccacggcgacgattgccgccgctgcaaagcggcgcagcggaatacgacggctcctgcggagcggagcgtcggcgccgagagcgtcgatccgccggttgaggctgttgagcgaacgcacgaaacgggcctgcagctgcgtatcgggacgctgcatgcggccgcgctgccagacggcgcgcagctcggcaaaggtacggcggttgtcatcgctgctgcgaatccacgccagcaacgcctgctcctcctcagcagtcgtggtgccggagaagtaggcaacgagcagttgctcgtcgaaacgggcggtcgtgtcgtcttgtttcacggttcggaatattgggtttctaccctaaatacacctcgccggggcaaatcacctatgcaaaaatgaaaaattatctgccaagaatatacattgtcaagagaatcagcatcttatagtgacttaatttttgtcggagctgcttcagggcattgtagatatggttttcgacggtcgaaagcgtaatgcccagccgttcgctgatctcacggttcgaaagtccttcgatatggctcatgcggaacacctcgcggcacttgggcgacaacgactcgaccgccgcatcgatttggccggcgatctcctgcgagtagagtttgcggatcacctcgctgtcgtcgggatcgtaatgggcgtaacagctctgttcgatctgctgcgccacccacgaccggtaggccgtggcgttggcgcccttcttgagggcgttgagcgaagcgtggtagaccgagcggagcaggtagccctgcagcgtgccgtcgtcgcgcaggttgtcgcggcggagccacacgcgcacgaagacgtcctgtacgacatcctccgccccgtcgtccccgacgaacagaccggcataattgacgagcgacgcccagtagatgccgtaaagttcgttgaaagcgccgcggtcgccggctttcacccttgctatcaatgtcgaatcttccacttcggttccggttagacgtttacaaagatagggctttttatcgtttgtccaaaaatgccgcatccccggccggcacatccggccgcaggggctgaaagtacggaaaaatacgttttcgcaagcgtcagggcgtgtcaaacatactttttgtgcatggatgcggactgttttcccggcaagatgacttaaatttgtactgtttgaaacgatatattaacctgataataaccgaaacatgaagaaaaacattctcctgaccgccgcggccctgctgacaactctggcaggcgcggcccagtggcagcccgcaggcgaccgcatcggcaccgagtggggcgaaaaactcgacccgcagaacgtactgcccgaatacccgcgtccgcagatgacgcgcacgcaggtgcaggacggctggcagaacctcaacgggctctggaattacgcgattctcccgatgggagagacgcccgaaaaatacgacgggcagattctggtgccgttcgccgtggagtcgagcctctcaggggtcggcaagcgtctgggcgaccggaacgaactctggtacaaccgcaccttcacgatctccccgaaatggaacggcaaacgcgtgctgctgcacttcggcgcagtggactggaaagccgacgtttgggtgaacggcgtctgcgtgggaacgcacaccggcggcttcacgccgttcgaattcgacatcacggcggcgctcaagaagggcgacaacgagctgaaggtacgcgtatgggaccccaccgacgcgggctgccagccccgcggcaagcaggtaaaccgtcccgaaggcatctggtacacccccgtgagcggcatctggcagacggtatggctcgaagccgtgccgcagcagtacatcaggaacatccgaaccacgcccgacctcgaccgcaaactgtttcgcgtggagacggccgcctgcggcgcgcagccgggcgacgtgatcgaagtgcgtctttacgacaacggcacgaaggtagccgagggccgtgcgctcagcggtgcgcccgtggagctgaacgtggcggagcctaagttgtggagtcccgcatcgccgttcctctacgatatggaagtggcgctggtgcgcaacggcaggaaggtggacgaggtgcagagctacacggcgatgcgcaaattctcgatcggccgcgacgaaaacgacatcgtacgtctggagctgaacaacgaaccgctgttccagttcggtccgctggatcagggctggtggcccgacggactctataccgccccgtcggacgaagcgctggcgttcgacgtcgtaaagaccaaggagctgggttacaatatgatccgcaagcacgtgaaggtcgaaccggcgcgctggtactaccattgcgacaagctgggcatgatcgtatggcaggatatgcccaacggcgaccaaggtccccagtggcagatgcacaactacttcaacggcgcggagaaacaccgctcggcagagtcggaagccaacttccgcaaggagtggaaagagatcatcgactgcctctactcggttccctcgatcggcgtatgggtgcccttcaacgaggcgtggggacagttcaaggctcccgaaatcgccgaatggaccaaggcttacgacccttcgcgtctggtcaatcccgccagcggcggcaaccactacctgacgggcgacatcctcgacacgcaccactatccgcacccgcgcatgacgctgctcgacaccaaccgcgcgacggtgctgggcgaatacggcggcatcgggctggtgatgaaagagcacctttgggaacccgaccgcaactggggctatgtccgcctgaactcgcccaaggaggtgacggacgaatacgagaaatacgccgacatgctctacaagctgatcgggcgcggattcgcagcggcggtctacacgcagacgaccgacgtcgaggtggaggtgaacggcctgatgacctacgaccgcaaggtgatgaaggtcgagccggagcgcatccgcaggatcaacgaacgcatctgcaatgcgttgaacaaataggaggggaaacgtccgaaacgaaaggaggaggtctttgcgggcctcctccttattttatattacaggattctccgtatccgggacgccggggtcagacgcatcgtatcgtagtcgagtcccgaaatgaccgtcagtccgcagcggcggccgggcgctacttcgcccagctcgtcatccatatccaatgccagcgcaccgccttcggcagcccacgaaagcagttcgggcagcggcacctccgggaacatgcgcatctcttcgaataccgacagccggtcgttcgaggccagcgagtcggtgcccagacagatgtcgagccggttgcggcgcagcagttcgacgggcggttcgagacgcgaaatatagcggttggagcgggggcagagacaccaccggacgggagccgtgaaatggttcatgacgaggtcgatgtcgcgctgcgtaacgcagcagttatgcaccagtatcacgcggcggtcgcggggtacgcttgcgacgagccgttcggccggagagccgtaatgcaggaagtcgcaggtgaagccgaccttccggtaccactcccaaagcgggccgcggcggacgaaaagctcggattcggcgggcgactccatgaaatggaccgacaacggcgcggcgccctcggccgcgatcgcccgcaggggcgcatcctgtaccgaatagagcgaatggggcgtcagcgaggtatgcggatggcggagcaggggccgcacggagtcggccgacgccagacgcaaaccgaaaaattcgatgaatgtatgataggcgacgcggctgcgctctttgacggagaaggtcgtatcgccgttggagatgtcgccgacggcctgcactccggcctgccacatggcggcgtcggccgccgctacggcccgcagccgttcttcggggccgaaccgctcccggacctgtcccatggctccggcgaaacccgcaaaaccgcacccttcgggaatcgcgccgcgcaggtaggagagttcgaggtggcagtgggcattgaccagtcccggcgccaaaacaccggagtagaactcggtgcccggcatacggtcgggtgcggagcaggtccgcacggagaggacacgaccgtccgccgcaacttcgacgagcgggttgcggacgagtccctgcggcgtccagagcaggttagaggctatccgtcgggatggctgcgcggaagaattcatcggcgaaaatacggatgtcgagctgctgcatgtagagactgtccacggcagcggaggtttcgggcgtatagtcgatcttcaggtcgctgaccgtcagcgaaggacgctggggcttcccgcggaactcgatgaaatcgacccatagccgccggtgggtggtatcgaccgtaaagcggcgggtgaaattctcctgccggtcgcggcgcagggtcgtcgtatagacgttggtgcgggtgctgtcgcggcgttcgagccacaccacgccccgcaggcccttttcgttgcggtcaagcgaatcgacgaggtatttgagactcaggttgtactcgccgggccgcacgtcgacggagaaccgcaggcgggccgtatcgcgcagcgagccgacgcggatcagcgagtcggcgtagaccgtgcgggtgaaactccggcaggcgacgttgtcgatcgtgtcgaggatggcgacttcgcggttgtaatatttgccctcggcttcgagcatttcgatcgccagctcgaccacgtcgcccagacgggcgctcttgcgtttcgagaagttgccgatggtgtagtagacgtcctcggtggtatagccgtaaccggcgaagatcggttcgtagatattcagcgaatcgatgtccacctgttcgctgccgatataggcgttggcgaggaaagcgtcgtgaaaaatctgcgccagtttcctgtcgggaatgatcttgtggcgggcgcaggctccggccagaacgagcaggaacatgcagaggaatatgcggacaatacgtttcatagcttaacgttggtttttatcatgctgcgcacggtaatattcgaaataacacaggcgaccacgccgaaagcggcaagcaccgccgcaaggtcgcccggacggaattcgacgggataactcttcgtgaggaacgtttcggccggaatctcgatcagcccgaagtgctgctgcaaaagcgtcgcaccgacgcccagcgccacgcccagcgccgcgccgagagcgcagataagcaacccttcgctgcggaatatcgaccgcacgagcgtcgtatcggcgcccagcgcgcgcagggtcccgatgtcacgccgcttctcgacgatcagcatcgccagcgacccgacgaccgaaaacgaagcgacgaccagaaccagcagcgagatgaagaagatgccccacttctcgtaggtcatgatccggtagaacgaagcccgcaattcgtagcgggtgcggacccggtaatcgccgcccagctgctgcgccacggcgtcgcggacctgcacggcatcggcgccgtcgcgcaggcgcaccaccagccccgaaacccggccgggacggctgaaaagctcctgcgccatgcgcagcgaagcgaggacataggtccgttcggtttcgaggtcgagcgtatagaccccgccgagggggatcgttcgccgcgtatagttgtcgaacggcagcagcgacgaaaagcttccccgccgcacggcgtaaacgccgacgtcggcgtcggccagcgtccgcacgccgagcatgtaggccatcgactgaccgatgacgagccgttcgaggtcgcccacccgcacccggtactctccggcagcaacggcatcggacaacgggaaaaccgtttcgtaggcgtcatcgacgccgcggaccgtcgcggtggcctgacggtcaccgtgttccagcagggcgctctcctccagcacgaacgacatggcggccacgcccggaatgcgtctcagcgccgcggtatcgaccgcgtcggccgcaaaggtctgcccctgccgggccgagacggtcagatcggcgtcgaaggccgaacacatggacttgacgaggctctcgaagccgttgaagaccgagagcaggacgatcatcgccgcaacgggcatcgctacggccgcaacgctcagccccgaaatcagattgacgaccgatcgggatttgggcgagaagaggtagcggcgggcgaagaactgcggcagcatggcgtgaggccggaagggttagtcgtttttgagcgcctgctcgatatggtcgatatactccagcgaatcgtcgaggaagaactggatttcgggcacgttcttgacctgattgcggatgcgctggcccaaagcgtggcggatgaacttgttgttgcggtcgagctcctgcatcaatgcggcgctgcgcccgaaggggaagacgctgacgtaaatcttggcgtaaccgaaatcgggcgacacgcgcacggccgtgaccgtgacgagcgaaccccggacgatgccctcgccctccttctggaagatttcggcgacgtccttctgtatctgtttggcgattttctgctgtcttgtcgtttccatgatggtgaaattttataatccgtatttgaagacttcgcggttcttttcgcgcttcggacgcggtttccacgtcgagaagccctccttgttgaatcggtagctcaacccgaccgaaacggtgaggttgtcgagcggcgaacgcatcggcgtcgcccaaaacgggttttcggaaccgtcgataccgttgtcggcgtatttgttgcggttgcgcacgatgtccgaaagtccgaagtagtagcgggcgcggacattgatctcgaaacgccggatcagcagcgcgataccgccgccgcccgcaagtccgtagccccaacggttgtcgcgcggcagtttgaaggagtagtcgcccttccagtcggccgctcccgaagctttcgccccctcgttctcataggtcgaagagaggtgataggagaaagtcgccgccgcttcgaggtagacgcggacatggttgcggaagaggtagaagtggggctgccacacgatcggcagcacgatcgaattgacgttgcgcgtgtagtagcggtaatccttcttctcctcgaccatcgaggcgttggtggccagcgagaatccctgctgcaggaattcgaggtcgatgccgaagccgcccacgaaaagctgctgtccgtaatagcgccacgtaagcccggcggtgtaggaaccccatatagccttcatctcctgcttggggtcgagccgcgagctggccatgccgtaacctgccgtgaagccgagcgtatgctgcgccgacgcgccctgccacgcaacggcggcaaaggcgagaaacagcagggttttaagttgtctctttatcataacactatcggttaaacatgcctccggtagagttcatgctgttgttcatgccgccgccgaaaccgccgaagcttccgaaaccgttgccgttgttctggttgttctggtcgtggctgttgcggttggttttcggttccttggcgcgtttctccgcctcgcggcgcaaacgctgcgcctcacgctcgtcgagcaggcgcgaaagcgattccatcgtcaccggagcgaagacccggttcatgtcgatcgaaaattcgacctcccagttggtcttggtcgcaaaggtgtcttcgccttcgtcgttggcatagatttcggcccgttcgggctggagccgctcgaccacgttgcccgtatcccacttgccgttgccgttcatgtcctcgatgatgcggaatttgatctcccccgcaggaacgtaattgaactgccagtcgccggtggtgacgtcacgtttctcctgcttgagcgcattgctgccgtcgagcagctggaggatgtatttggccttgtcgtccttgcccttgacatggattttcacggtggcgaacttttcgggatcgagcaccgtgtatttcctgacgatcgagtcgttggagaagcccgcgacgtcggtaatggcgcccttgggaatggtcagcgtatattgtccgccgctcgtccacggcgcctcgatatgccagcggcgcagcaggcccgtgtcgcgcacgaagcgcaccggaacgtcctcgatgctgttgtcggaccgggtgagcgtcagaagcatggccgccgaatcgagccgggtaagcggatagtcgaaatcgacggtcaggttgttctcaggattgatttcgcccgtgagcggaagcttataggcgaagggattctccttcttgggttcgacccacttctcgccggccgcctcggccttgcggcggtcgcgttcgagtttctcgcgctccttctcctgctctttggtctcgatcagccgccaagagagtttcagcggttcggtaacctcctgcaggacattgaccgtatcgtgcttgaagtaggtgatttcacccttgatcgtatcgggcaacgccgaagagggcatgttgaaccacaaggcgatggtgtcgcgcccgacggtctgcggatcgacgatgacgcggtcttcgggaatgctgtcgaagcggatgcgttcgatgcgcggatgcgcagctccgaagtagagcatcgccttgtgctgcaggggccgttcggtctgcgaaagcaactggcggcggaacgccttgtcggtgaacatgcgcagatagagctgcggctcggccgtgacatattggcggatcgagtcgtaccacatggcgaagtcgggcatctcggccggattgtagctcttttcgaggaagccgacctgatcggaaccgggttcgtacatctggttgtcgttcttgtcctgaacggcgtaaacccggtaggggatcggcttgaggttttgggcgatgaagatgccgttgttttcggcacgggcgattacggcgggcttgtacttgaagatcgtcgagtcgtattcggccacgttctcgaccgaatccgccgggaagaaccagatgaacgacttcgacaccgagtcggccttgtagctgtcggccgtatagcccgaaaagatcatcgagtcgatcgtgggtccggtcgaaaagacatagcgcatcgaatagagggggttgccctcgttgttgtcgcgcacggcgctgccgaaattgagcgcataggtcgtattggcttcgagcgtatcgcgcagctggacgacgatgcctttgccgcgcatcgaaaccagcggcttcttcttcatctggggtgaggtgaagaactccttctgctgatccttgagctgcacgaactcgtcgaattcgatgtagatcttctcgtgatgcacggtgggccggttgaccgagaagttgtcgggcgtcatgttcaggatgaccggcggcagggtgtcgcggggaccgcccgtgggggtcatcatgctcgcgcaacggctcagaaaggccgtggcgaagagcagcaggactgcggcgcgcagcaggcgcaggatatttcgtttacgggtctgcatcgttatctcttgcttgctttttcaggctccttgggagccagtttgtcattgaccacgcgccagccgccctcctcgacatagaggtattcctgcttccacgggcggaaaacgaccggaaggaagtttacgggctggccgccctcgacgatctcgacctcctgctgcgagtaggcgtagagctggttgacgggatcggtcacgaccaccatcagcgtcggactgctgaccttcatgccgtaggttcccgactccttggagtaataggcttcgaagtcggggctggtccgcgtctgcttgggatcgctcttcgaggtaatgatccgctgcgccgcatcgttgtaagagttgatcttccatgcggtcgtatcgacggcataggcgtaaaccctgaggttggacggcacggtgggttcggcgccctcctcggcctgaagctgcgcggtgacttggctgtcgatatagatcgggggtgtataggaatcgttgaacatgagccacttgccgtctttgtaggagtaaccctgtttccaccgcttgaaaatcagcgtgacatagattttaggggtgttttccggcacttcctgctgcgtatagccgtaaagttcattcttcgtgtccacggcgaccaccatcaccgaggatctgtcgaacgacatctggagcagcccttcgacgccctcctgctcatagggttcgcccgcggcgagcggcgtggagatcttttcgttgcggttgccccgctgcgaaattacgcccgcgagcgcatccttgtaggaagcgacctcccacgaagaggtgtcggccgcaaaggcatagagcttcgcgtcggcaagaatctgcgtcggatcgcccgatttctcctgctccagcggcttgaacacataggtcgtcttgtacgagacgtctttgaaacaccccataaacaacgcggccgcggcaagaaacaatatgattcgttttgtcttcatctccggaatttacttgttacgaagctcttcgagcatctcccccacggtccgccccgtaaccggatggcggcgctggcgcatgatctcgcagagcggcacgagtgcgaactcccgttcgcccatgagcggatgcggcacggtaaggcgttcgctgtcgatcacctcgtcgtcgtagaagaggatgtcgatatcgatcggccgcgaggtatagttcacgcccgtgcgggctttctcgacagcttcggcggcgcggttgcggcccaactcccgttcgatggcctgcacggcgtcgagcacttccaaaggcagcaggtcggtcgagacctccagcgcctgattggagaaaaccccgtcggcgtcgaagccccaaggcttggtttcgtagcggtgcgaacagcgcagcacggcgccgaccttcgcgttgacgagctgctgggccgcctgaagcgtccgtttcacatcaccggaattgccgccggtcaaaagtactacacgtgccataactcaaagtcgttttatcattttgctcaccgaaagcgcaaaatgggtgaatacgatcgtcggatttccgttctgcgaaatctgcgccaaagcgcattcgatctcggcaatgagcggttcgatgttctgcgatccgacgaatggggcgaatttggaacagaaagccagctcctcgccccagagatagctgatttcgtttatgcccgcatggagcatgtaactctcgcgcagcaggcgcgaagcgtcgcgcaggaaggcccgctgctgctcgcgcgaaagctgcgcggcctcctcggcccacgtcaccagctccagatgcttgtcgttgtagctcaaacgcatcagcccgcagaaaaggtcgaagttctctttgcgcagggcgtcgctctcgccggccacgaggtgctgcagctccaccagatcgccgccggccagacgggcgatgttccgggccttgaccgggtccgtaacgccccgctcctgcgccgcgcgctccagcacgtcgggcgcgatacgcggcacggcgacctcctgcgtgcgggaaatgatggtcggcagcagccgttcgggctgttcggagatcagcaggaaaagcgtcttttcccacggctcttccaaaatcttgagaatcttgttggccgcctcctcgttcatcgcttcgggcagccagatcagcatggtcttatagtcggcttcgaagctcttgaacgaaagtttgcgaatgatgtcgtcggcttcgcgcgcggcgatcatgcccttgagggtcttgcccagatcgaggcggtcgtaccagtcctgcgccgagaaatagccgccgcgctcggcgaaaagcccgcggaacagcggcaggaactcgtcgctgcgcatcacctcgcccgacttcttaccctgtttgttgaccgggaagaccagatgcaggtcgggatgggccagcgcagcgatctgcttgcagtcgggacattcgccgcacgaatccccgccgcggcggtggcggcagcagaggtactgcacgtaggcgaccgccagcgcaagggcccccgccccggcctgccccgtgaagagctgggcgtggctgatgcgtccggcgtccacgctctgcaccagatgccgtttcaaatcctcctgtcccgttatatccgcaaaccgcatgtctcgctacttcttttttccgtttttcaaaaccgtctgccgcacggcgacggccagcaaagccagcacgacgcacgtaaggacgaccgtacgccccgcgcctcggtccatcgagagggccagcaccccgccgacgaagagcgcgaaactcaccgccagcacgacgatcttctcttttgcactttgtctcatcgcattgccggctcttctattttcttttcaaggccgccttcaccagtgccgcaacgtcgatccgctcccggcggacgaggtagagggcataggccgcaaacagcactatattaaacgcataggcgatcaatttattgtcgccgcaggccgttacggcttcgcacacggcgaaaaccgcgagcgccgcggcgacatactcgccgatacgccgccagtcatagggcgtcggatagaagcggcggttgagccaccagctcacggcgaccatcgtcgattcgctcgccagccgcgcccatgcggctccgtagtaaccccacacggggatgcaccagaagccgaaaaccagcatcgaaaccagacccgcgcccgtaaccacgatagccagcgaggtcttctcctcgcgtttgtaccagaacgacaggttcagccagacgcccgtcagcacattggctccgaggaccaccgggagaatgaaaatcccctcgcggaagtcgcggcccacgatcagcgcgaaaacgtcgcggaacaaggcgatgccgaggaaaatcagcatcgaagccatcacgtagtatttcagcgccgcggcgttcatctgcacgaaatccgacttcttgaaattcgacaggaagaacggctcggctgcgagccggtacatctggtaaaagagcatcatcaccacggcgatcttcgtaatggcgccatagatgcctacctgcgccatggctccttcgggcacgaggtatttgatcagctgccggtcgatgaactcgttggccgtacccgccagtccgccgaccagcagaggcagcgaataggcgaagaccgcggccagcagcgcccagttgatcttgggcacggtgcggtccacagtggcgagaatgaccagccacgtcacgacgctggcgatcaggttggcgacaaaaacccaaccgacaccgaattccgtagcgaaaagcccggcgacgccgaaagcgaccgccaacgcgacgttcatcaccacgttcagcgccttgatgccgacgaacagcagcgcccgtccctgctcgcgcagccgcgagaaggggatgcaggcccagacgtcgaagaggatgataagccccacccagaccacatattcgggatgcgcggcataagcctcgcccatcagccccgcgacgccgttgcggaacgaagcgacaagcacgaagaacaccacggcggcgagcgacgtaacgccccatgtcgtggcgaaaagcctgcgtttggcggcccgcacgtcgcccccggcctcctcggccttggccgaaaagcggaagtagctcgactccatgcccatcgtcagcagcgtaagcgccagcggaatgagggcatagatgtccgtgacgataccataggtctcctgcccgaaaatacgggtatagtaaggcgtgagcagatagctcagaaacctcaccacaatggtgctgatgccgtagacggcggtttgtttggccaatttttcgagcatggcagacgatttgcagtcgacaaagatattgcacgccgggctttgcgcccgacaaagatacaaattttagccggaaaccccgcataatgccgtttctttcggcaaggcaagataaaaacgtcccggaagccggacaaagcccctgacaatcggaccgaacagcgtatttttccacccaaaatgatataaataaaattgtgaatcaatatcttttattcttgcagaaaaaatacttttttatggaaatttgcatgaaatttccataatgagtgttgttcaatccgaaaattattttctaattttgtcctgtcgcaaaccgacagacatacggaaagtgtttttcactctgtccttacaaagaaatctgacagtttcaacgtgaatcggggcaatgaacagcactcattttcttgtttagatagattcggccaaaacaattttgcgccgcaattttcgtatctattcaagtgtggggtaaagcattcgtttattcgattctgggttttgtcagaacctctttgtagatgaacgaaaacagctccacactttctttttgtacaacccactacatgtaacacccgccttgtggagctacgagggggggggaatttgccgaatatcagccggatactcatctcgaatgaaacggcatatcgaagaattgccctatggaacaaccttgtatacgcagttgtccgagttccgaaacccggcacgtatccgaaagaatacggtccgggagcgtccgtttgaggatgatccgtatacatgcatgcagacgaacctgatcgaagatacggccatgaaattcagaatctttcttttgttatgcgcatcgctctggggatggaacgtccgggggcagagcgtagctttgaaaacaaacgtactgtccgatgcttttatgaatataaacctcggagtagaaaccggtctggccccgaaatggacattggacatcacgggcgatttcaacgcatggacgctgtcgcacggccgccgctggaaacactggctcgtgcgccccgaagcgcggttatggttctgcgaccgttttgcaggacatttcataggtttccacgcgcacggagggcagtacaacatcggaggcgtgaaaaatggaatctcgttcttgggttccgatctctcgaaactttcggactaccgctatcagggctggttcataggcgccggcgtcgcctacggatacgcttggatactcggcaggcactggaacctcgaagccgaaataggcgtgggatacgcctacacgcaatatgacagcttccgatgcgtaggctgcggaaagagagtcgagaaggacaaaccgcatcattacgtggggacgaccaaagcggccgtcaatctggtttacgtattctaaatgctcgctgcaatgaaacgaacgatttttttcctgtcgctgctgttgggaacgagtccgctgccgcacgcccaagagatagacggggtcacggtcggaaacctgaagatggatcggaacggcgaatatctggtcgtggagatggatgtcgaactctcccggctggaggtagaggcgaaccgcgccgtacttctgactccccggctcgtgaacggagccgattcggccgacctgcccgccgtcggcatctacggccggcgccgttactattattatgtaagaaacggcgcaagcatgctgtcgggcgacggcgagacaagtttcaaggccgccgaaaaacccgaacgggtagcctatcacgtcatcgtgccatacgacggatggatgaacggcgccacgctccggctctcccgccgcgactacggctgctgcaacacgatgctcgccgcacagcagggcctgctgggacacttcgaggaacccgtcccctacactccccggcctgtctacgtccggccgacggccgaggccgtcaaaagccgctcgctgagcgggtccgcgttcatagacttcccggtgaacaagaccgtcatctatcccgactaccgccgcaacacggccgaactgggcaagatagaggccaccatcgattcggtgcggaacgaccgggacgtgacgatcacatcggtatggctcaaaggctacgcatcgcccgaaagtccgtggacgcacaaccgcatgctggccataggccgtaccgaagcgctgaaaaaacatatcagacaactctaccgcttcgatgagggggtcatcgaaaccgattacgaaccggaggactgggccggactgcgcagctatgtcgaatgctcgaacctgacgcaccgcgcggagatactcgccctgatcgacagttcgctcgaacccgacgccaaggaggcgaaaatcaaacgctcctattccgaagagtacgatttcctgctgaaaaaccgctatcccgcgctgtgccatacggactaccggatcacgtacaccatccgcacgttcagcgacgcgcaggagatccggcacatcatgctcacgcagccgcaaaaactgagtctcaacgaattctacttgcccgcacaagcctgcagccccggttcggacgaattcaacgaaacattcgaaacggccgtacgcatgtatcccgaagatacggcggcgaacctcaacgcggcgaacacggccatgcagaaaggcgatctgaaaaacgcggaacactatctgcgaaaagccggggagtcgcccgaagccctctatgcgcggggcgcatacgccatgcttacggaggagtacgaaacggccgccggctatctacaggaagccgagaaggccggcatacgcgagaccagagaggctttggaacagttgcaaaaacggaacaaaaaataaaacttcaatcacatctcctatgaaactgaaaaacatcctttgcgggatactcgtttgcggagcattctgcgcttgttcggaccaagagcccgaaaacagcaacaagcccggatcattcgacgggaaagcctatctgagagtcaacatcaccgacgcgaactccacgcgcgcgaccggaggcgacttggaatacggcgacgcgaccgagcacgaagtggtcaacgccgacttcttctacgatacgaacggcatattcatcgcccgtgcaaacgtctgggacagcggcacggagaatgaggacaaccccgcgggcaacatcgaattcttcggtaaatcggtcatcgtgctgaagggcctgaccgaaaccaaccacccgaaacacttggtcacggtgctcaacacgccggaggatttcgagccggcaaacacgctggacgagatgaagacactgcttgcaggcagcatctacaacgggtcgcacttcaccatgagcaccaccagctacggccgcacggcggcggttccctacttcgtgacggaggtgagcgaatcggacttcaagaaggagctggacgaggcgcagaacgcaacgcccgtagacatctacgtggagcgtctggcggcgaaagtcaccctgcgcgtggacaacgataagctcgttccggtcgatgggaaacccggaatctacaaggtcaaggtgactgtcgccggagaccccaaccaacaggagcagggaacgcagaccggagcggccgacatctacgtccgatccctcggatgggggggggctgaacgccaccgccaaggattcctacatcgtcaagaacatcgaaaccgcatggtcggatgcggacctcggattcgtttggaacgatgcggtctggttccgcagctactggggaaagtcctacaactacggcaaacaggacggcaagtatcccgacgtttcggcagaagccgcagtcgccgaatacctgaattacatcaacgccgacaagcttaccaaacaattcgggcagtcagcctattgcgccgagaactccaacacgtcggaaatcgtatcggagtatctccattcggccgtgacgagcatcctgctcaaagcgcagatcctcgacgagaacgaacagccgctggagatgatacgctacaacggaacgctctacaaacgcaacgactacctgaactacgtgctcaacacgcttcagaaaggcaacaagctgaacctgtactgtctggaagacgaggcgaccggaaaatacgtgcagatagatcatgactgcgtcgagctggccaacgaccgcgacggaaaggtatacctgaaactgaaaccgctcgccgcaggcacctcgctgtacagaaaatcgggcgagacgtatgccccggccactgataccgagctcggcgaggtcgagaagaacatgaaggatttcaacgcctacaacgaagccatcggctacaaggacggactgatgtactacaacatcccgatcgagcacctgaacaacgccgcgacgaccaccgacgccgaaaacaaacgggtgatccccgtcgccaagtacggcatcgtccgcaaccatcactatgtggtgaccgtcaacagtctcacgaagatcggcaaaggcatcttcgaccccgaagaggagatcgttcccggaaagaacgacgaaaaggatacctattacgtaggcgcccggatcaatatcctctcatggaagatcgtcaaccagaacgtaaatctgtagtttccggcagccccttcgcggaaggggctgccccggtccggacccgatgaactaaacagagtgacagagatgggcacatcgtcttacatatacgcaataggcaaaaggacgctcgcggcgatcgtctgcgccctgacgctgctgggctgcgacagcgtgatctacgacggcgagggcgactgttcggtaaattaccgggtgaagttccgctacgacatgaacctcaaattcgccgacgcattcgcccgcgaggtcgagtcggtaacgctctatctgctcgacggcggcggcagggtggtctggcagcgcacggaaagcggcgaagccctcggcaaagagggatacgccatggaggtggacgtcgctccgggaacctacgacctgctggcatggtgcggatcgacggacaaaggttcgttcagaatcccggaatcggcatccggaaaggagctgacctgcacgctgatgcgcgaatccggaaccgacgggacgggacacgtccgcgaagacctcgacaggctctaccacggctatctgccgaatcagaccttcggcgacacggagggcacctatacctacgtcgtaccgctcgtgaagaacaccaacaacgttcgcgtcgtattgcagcagacgtcgggagagcggctcgacgagaagcgtttctcgttccggatcaccgccgaaaacggccggatggactgggacaaccagctgctgccggacgaaccggtgacctatcatgcgtggcacaagcagtccgcgacggccggaacagcgcttcccgacctccccgacgccgtgacgtcggtcaatgccgttatcgcagagctgaccaccgcacggctaatggtgcgcgacaagagcgcgacggtccgggcggaaaccggaacgaatccgccgcaactacagccggaggaattgccggaggagcgcaagatgaggctgacggtgcgcgacaacgacaccggaaagaccgttctcagcatcccgctggtggactacgccctgctggtcaaaggcgaataccgccgggatatggacgagcaggaattcctcgaccgcatggacgagtacaacatcgtatgcgtgctgggagagggaatgcgctgggtcagcatgagcatcaacatccattcgtggaaaatggtttggcaaaatacgggaatctgacaatttacgcacatgtcaccgaacggaatcatacgcattttcatctgtctcgcgacgctcgccggcgcgacgctcgtgtcgtgccgccggaccggacatgaagagccggtccccggaaccggcacggagcggccggacgacgtgcgggtaagtttccgcatcgcgctcggcagcacgaacggcacgcgggcgggcggaacgcccgaaggctcgtacgacgacggcacgcagagcgaattcgagaacgggatcgacctcgaaaacgggaattacagattcttctttttcgatgcgcagaaccgatacctctccgcgttccagacggtggagcttatccccgacggaaacgactccgaccggtcgaaaacgtatgaagtagtcggaaaaacggacaagatgccgcccgcgaatttcaaggtcgtcgcactggcgaactggccctcctaccccgaaaaaatgacggcgggagagacgacgatcgaggagctttgcacggcggaaagcagccgttacacgttctccgcaccgttcgtactgtcccgcgaacggctgattccgatgtacggcgtaaaaagctgcgaggagatgactttcacaccggggatgctcacccatctggggaccgtccacctgctgcgcgccatggccaaggtagaggtgagctgcaagacatcgggctggacgctcgaaaaggtcgaactgctccggtacaatgcgacgggatgctgcgctccgagtggggtctactcgcaggacgactatgtcaagggaaactacgccggcgactacacggacgccgtgcatctgccggacggcaggaacgacgaggccccgaaaacacgcgcattcgaccgcacggcggacgggcgcttcatcgcctacgtccccgaataccggaacgtcgcggcagggaccgcgaaccgcaaagcggccgacgccgccgaaatgcgggtccgattcaaggaggcgcccggcaaggagtatgccgtagaattcaaatactacaacgcgccgccggaaggcagcgccgtcggagatccgttcgacatccggcgcaactattactacaaattctcgatttcgaagacatccgaaccggatctcgtcgtagaggtatttccctacgaactggtcgaactcgatcccggattcggactgttaccctaaacagacgactgaaacggatgaaaagcaaagcgatatattacctgctgctgggcggcatgctgttcggattcggttcctgtatgcgcgacgacttggaagcggacgcgggaccgatcggcaagggcgaaagccgcgtatcgttcgccgtgacctttcaggccctttcgaacctctccctcggaaaaacccgcagcctcaatggcgacgagatcgccgaaatcgaagatatcttcatcgcatggtacaacgaagacggctcgctcgcgggaaacgcctaccggacacgggagcagatgaagatttcggaccccgaccgggaaggaagcccgtcagaacagaccacgcagcgggccgaattcacgtgcaacattccctacggacgttaccggatctacgccgtggccaacatgggcgatctcgcggcaagcacccgatatgctgaaaaaatcgctctggaggaggatttcaggcggatcgccccggcatgggagaccgcccccgaactgacgcggaacaacgatcagatgtccggctacttcacggccaacaaaccggaatccggagcggtccggggcgaagcgccgctgctgacgatcaattcggccaagccgacgatccacgcatggctgcgccgtctggcatcgaaagtcacgatatcgttcgacacgaagaatctctatgacaacgtctatatctacatcaagtccgcgcgcatacacaacataccccggtcctgcacgctgctggacgcaaacgacgaacagcgcatcaaggaccccgacaacgacgtatggttcgccggcgacacgatcgaatacggtcagggaaccgatttcaaccagtggccgcgcctgacaaaaggctccaaccccttgggaggaaccgcccaatccaaggagcagctgcacgccaacgacgcccggtcgctcttcttctacgaaaacatgcagggaaagggcaagctcaaatggcaagatgtgtcgggcgacaaccagcacatatccttcctggacggcaacgaccccgacgatccgggataccgcgacggcaagccctgcggcacctatatcgaagtggagggtttctacatctcgaacaccgcggagaaccccggaaagggcgcgatattctaccggttcatgctcggcaagaatgccgacgacgactacaatgcggaacgcaatttccactacaagctcacgatgcgtttccaaggcagcgcgaacgacgtggactggcatatcgactataatgaggaccccggcatttacgtccccaatccctattacatctcctatctgtacgaccactcgatgatgcttccggtgaagatcaaaggcaaacccgtcggaaatctgaaagccgagatcgtggagaacaactggggcccgtaccaagccggcgacgagttcgaatactaccccgacgaagtctactccctgagcggaaacccgaccgcgggcaatgtcactaccgcagaccccgataatccgaagatcaaggacggcccgtggaacggatttctgtcgctggccgcgacccatatcaactggatcggacgcgacaaatctttttggtgcggctacaactacttctactggctccagaaagacttcggaacggccctttcgggagaaagtctggaggcgtacggcgaagcgctgctgcttccccaagagaaagggcaggcgccccgcggataccgggagtacgagctttcgaaaagcggcacgatcgacggagggaacaacggcgactacatcgtcacgatcgacgaggcgaaagagaggaccgtcctgcagattccgtgctacacgcgggcattgcagctggtgagtacgaccggattttcgggcaacaacccctatttttcatacagacgctcggcgaaggtgaaactgaccgtccagctggaggggcatcccgaacctacggtggacaccgtgacgatattccaagtccgccgcatcatcaatcccaaaggcatttaccgccgtcacgacaacgacacaccgttcaacgtggtgctcacacaccgtaagaacgaggccgccacacaataccttccgttcgaatcggaggggccgtgggaggctgaaatcgagaccggcagcgactggatcaggatcaacggcgtgctcggaggccgggccaaaggagccaccgggtccgaaatccggttctcctaccagccggacggcaccatcggcgcggatcaatgcaggtacgggatcattctgatacgttaccacaactactcctgctaccaccggatcttcgtccgtcagggctacgctcccgcccaaatcgcgggcgatgccaaatggcactgtttcaatctttgctacaacgacacggaagcgaagtcgccgtgcgaggaggggtcgctgttccgcttcggcaatttcgaccagcccatcgacgcgaccaacaacgtgttcgacaatttcaaggaccatgcgacgaccgagttcgatctggctcccttggagtcgggaaaaaaggggacatggaccgaggtcgcgggaaaaacgcagatcacgaacaaaccccgcgcttcggcaggattcagcgaccgcaaacagaccatcaacggcaatcccaactgccatgtagccgaatacgaggatttccacgccctgcaactcaactgccagttcgcatacggcgtgctttacgacgacgaatccaccgaaacctctttcgacgtgaaggacatttacagctacgcctattacaacgaaagcaataagaacaaaggcatgcgcggatgtttcgtctacaaccccaaagggagtacgaattcaggcggagagggtgcgaacctcttctttccaaccggagtcgccggatacggccggcgtaagaactgcacgcaggagggcggcaaacgcggcgtgctgcgctatgccaaccgaggtgcgctctacacctcgtcggacattcattaccgcccgatgctctacaccgtttacaccaatttcggagcgatctactggctcaataaacagtcggcttcaggaacttcggcgtgggatataaacgtctccacgttcgacttcaacagtttcaacaacaacgcatttctggtgtcggactggggcgccggcgacgtaagcgacgcctgtttcgtgcggctggtggagtaacgggaaagaaaggccggagcgcgcccgcagagcgggcgtgtcttcagagccacttcttgtacttgaagtaccagatggtcagcgcagaacagaagatcatcagaccgatggcgaagatatagcccagcggaatgttccagccgttggagagcgtcagggtccagtccagttcgggcatgaatttgaagttcatgccatagatcgacgcgatgagcgtcgcgggcatgaagatcaccgccgccacggagaagatcttgacgatctcgttctgctcaatgttgatcagacccagcgcggcgtcctgaatatagtccagacgctggaagctgaagtcggcatggttgatcagcgagttcacgtccttgatcatcagctgcaagcgcggatagatgtcgttcgggaaacgttcggagcgcaggatacccgacagcacgcgctggcggtcgaagatattttcgcgcagcgacatggtgctctcctgcagagcgctgatgcggtgcagcacggccttgtcgatcgaatcttcggagttgatgtccttcgagagcgccgcgacctgcttggcgatcagctccacgaggtcggcgtcgaagtcgatgcgcacctccaagagcgaaatgaaaaggtgataacccgtcgaatagttgcggtagttcatctgcaggcgcttctccgtctcgcggaaagtccggaattcggcactgcgcaccgaaaccagcacgccctcgttcgaaatgatgaacgacacgggttccacgatgaacgtgtcgcccgtcggcacgaagaaattggagttggagatgatggcattctcgtcttcggagtatttcgaagtcgattcgatctcctcgacctgctgtttggtctgaaggctgatctccatgaagttctcgacggccttctgctccttgatcgtgggcagaagcatgtcgatccacaaaatgtcgtcgtaacccagctcgtcgaagagcttcgtgtcggcattgcggataatcttgttgtattgcttgaggtaaatcgtaatcataaaacgctctccttcttaaagttcataatcctgttcggcagagaggcggacgaccgtccgctaagctcttcagccgggattggccctcggagacaccttgatgccggagttccagaacttttgcagcgctttatgcttctgattgtcgaaaatatagtcgatattctgcgttaggtagccgtacgcatcgtacggtttgcggtcgaagccgtgttcgaggacggcctcgtacgtgtgttcgatgccgaaagtcagcgcatgctgcaacccttcggtcagatcgggatcgacacccttgcgggcgatccagacggcgaaagcgaagggcagacgcgtggcttttttccactcggcggccagatcgtacgaataggcgaagcggccctcgtagtcgaaaaccttgtcgccgatcagcaggaaggcgtcgcccggcagggcgcggtccagctgcgcgtaatcctccatcgtatagtattcgggagagaccttccagtgtttggccaacagatagccggccagctgcaccgaggtcagcgaatgggcgtcgaggaagacccggcgcaccgtttcgatcggctcgccgctcagcaggacgaccgtccgcacgggaccggcggcgccgatgcagtattcggtgacgatctcggcgtcggcgagcgacggcacggcggcggcaggtaccaaggcgatgtcggccttgtgttcggcgaaattctttgcgcagacggcggggggagacaacagcagttcggcacgcaggttaccttcgtgcccgataccatagatgaacggtatcgtattgagatacgacacagccgctatacgtggaactatgaccatcatccataaggtataaaactgttggtttcgataaggcaaaggtaatcaaaaatcgggagtttttccataaaatttagaaaaagtgccccgacctcttgacaagggggtatccgccgatgtatatttgcatcacaattcacaccgcacggtgcaccgtgcacggggtatcaacaacgggacaaaattctttgtcagctccttacgaattgttattaccgtttttcaacaatctttcaaacacttgtcaacaatgaatcgcacccatctcgaaggtgcggcggaagcgctcgcggcgcagcagggttacgctttccacacgggacccgaagacggcatggcccacaccatgcgaagctacccggcggcatggctcgcgcccctcgaactgcacgccgtcgaaggacgcggccacggccgggcgacgtacaacatgacgctccacctgttaagctccggcgcacggctctcccccgcggagcggcgcactgcgctggcccggatggaggagcagctgctcgaaatcttcgcggcgctttcgctcgacgaacgggttctcgccgtcgaagggctttcggtccgcccccgcgccttcgcactcacgccgcacggcgaaatctcgcagaccgccgccgcgcgcatcgtaaccttcttctgattcggagcgccccgcctcttgcggcgacaccgccccggcccggctcagggcacggcactgtccgcacacgagaaagccgcaaaaggcggcggggcgcgtctccgccgtaacgacatctctcaaaacacgatccaatgacattcacacaaattccgcaacagtacgccccgctcggcggagagcttcgctacacggtcacggccgcggcggcggggacgatcgacctgcgcatcaccgacaccggaagtgcagacctgatcggcgcaagacgtttcgcaggaagcgcgtcggtctcgttcgacgccgcgccctgcctgcgccgcgccatccgcttctcgcccgtgaccgggagcaccggattccacgtcgccgagggccgctgcatcgcggcggtcgtcgaggccggcatgactccggccggagaaacggacccagcaaacggtgaaaaagccgtctccccggaacgcacgttcctgccccgccgcaacatcgtcgcggcccccgccctactaacggccatgccctccgtccgcacgatctcgccgggcgaaagcgacgaactgacgctgctctgcgacgaagcctgcacgataacggtcacggcgcaggccggggactccgcaaccgccgagagctaccgcacgaaaagcggcggagtgctcgtcttccggctcgacacccgcgactttccggacgccgaaacgctgaccgtggacgccggaaaatgcggttcggtctcctacacggtcgtcccgaccgtttccggcggccgcaggctcgcatggcgcagcagtgcgggcagcatcgagcattacacctttccgatcgaaaaatcggtgacggctgagaccgtaaaggaccgggcgtacgggaccgacggccacctcacggcggcggcccgcaccgaacggcggaccacgctcgtatcggcttacgagacgcgggccgtactcgaagccctcggcgagatcacggcttcgcccgaagtatggctggcggagggcgggggatatacgccggtcgacgtaacgaccccagccgtcgtcgtacaccgccacgcggcggtgaactgtctcgaaatcgaaatccgctccaagcgcaaaacccgcatgccatggaactgaatatcgacggaaagccgtgcgacctcggatcggagcggatcgccgtgccgggatacgccgccgcggccctcgccgacgtcgaggccgcccgcgaaggccgttcgctgacgctgaccatccccgcaacgatgcgcaacgatgcgctcgccggattcgcccgcgatccgcataccgcagaacggttcaacgcaacgctgcacacggcggaacttacggccgaaggttccgtgatgctgagcggaacggtgcggatgttgagcgcatcggacgaaggataccggatagaaatccgcgacggcggagcgggctgggcgaaaaacgccgcacggcggatgttcaacgccctcggcgtcgatttccgggcggccctgactccggagacgatcctcgcaggctggacggacgattcgcccgtgaagttcttcccgatccgccgcgacgaatacccgcagcgcaacagcccgacggacctgctccccgcccagcggctcctgacggtggacgattaccacccgttcctgcatgtggcgacgctcgtcgaaacgatcttcggcgaagcggggtaccgcatcgaaagcagattcatggagtcggagctgttccggtcgctctacatgagcggcgcatacgcctcgcgcgacaccgcggccctcgccgcccgcatgggctttttcgcccggcggctgtcgtccgcaacggcgaaggccgattattcgggccgcgtggccgccaacccgaataccgcgctcaattccgtgggaaacatcgtcgagacggccacgcctcagacccccgacgccgacggggaaccggttcccggcctgagcaacaacggcggctgtttcggtttcgaccggggcaatatcgtattcacgcccacgaccgaggtgagcgcgggattcgagtattacctgaagtacaccaccgaccacgtgatccagagccgccagcggctcaaagggttcgattcggtctacctcggcacgggcgccgacatgcgtttctcgctggccaaccgttacgaagaccgccgcggcgggatcgcgcagaaccgcagctacacggcgatcgtcttcgaccacgccgaaggaaggcaataccgtctgagctatacgaggaacggaacggcggacacgctctgggccgaattctccgcccgcacggcgcaggtcgtcacgcccgcggcaggaagcgtggcgaatcccgtgctgctggtcggcagcggctcccgctgggagccgtacgccggagattgggcgctgtacgacgggtatatcgccgagcggggagagaccaccgtcgaactgcgggtgcgcaccgccgccgagcggctctcgccctcgtcacccaaatatttcaaccggatttacttccacggggccgaggagggcatgtcgctcaccctgcacaaggaatgttcgctccagccgcgtttctcgtcggcgcccggatacgggtcggcgatcacgttcgccgacgtggcccggcaccggatccggcagtcggaactgctcgaagcgctgcaacacctcttcaacctgcgcttccacaccgagcaggcgacaagaaccgtccggatcgaaccggcggacgatttcttcgctgcaggtcccgcggccgactggcgggcgaaaaccgacttctcgcagcccgtggtgctggcggacatcgcccccgaagtccacgaacgccgcacatggcgctatctggcgggcgacggagccgtggcccgtttcgacgccgaggctgaaagccccttcggccaatggagcgtcacgacgggctcccgtgcggccaaggagggcgaaaagacgctggccaatccgctgttctgccccacgatcagcaccgcgggaggttactccgacgcctcttcggccgtaatcatgcaggtcggagaccgcgacgacgtacaggaggacggcaccaacttcacgccgcgcatcgtacgcttcgcgggcatgcaccccctgcccgacggcgagcggtggggatttccgtcggggcaggcggaatatcccctcgcggcgttccatttcgcgggggacggcgcggcggcaggattcacgctctgcttcgaggaccgcgacggcgtgcggggcctgcaccgttattatgacctgcaaacgggccgagagtccgcaggccggcgcatcaccctctcgctgcggctcgcgccccacgaattcgaaagccttttcacgcccggaacgggagcgcccgacctgcgttcggcgttcctgctcgacacgggcgaagggacggtccgcgcagcgctccgtgccgtggaagattacgacccgcaggcggcctccgtccgctgcaccttcacccaactccccgacgcatgacaacccgccacaaaaaacgactggccgcgatcctgctgcgggaactcggcgggctggagggcgaacgggccgtcgaacggctgttcgaactgggactggtcaacctgcgggtctgcgaacagcgggccgtacgcaacgaaatcgaacggctgggcgcagagggcgtgccgcggtgcgaagccatgcacgccacggccgaactgttctgctgctcctacgaaaaaatccgcagctactattacaactcgtacaaatcctgaaacatgaaatcggaaattcaaatcgacaacaacgccggcgtctgccaaatcgacatcgagggcacgatcggcgtgcccgaagagtggcagttcgaccggcccgaagcgcgcgtggcgacctacgaaaagttccgcgacgccgtgcgccgcatcgccgaaatcgacgcgtccgaagtggtggtcaacatccgctcgacgggcggtgacgtgaacgacgcgctgctgatccacgatgcgctcacggcgctcggcgcacacatcacgacccgctgctacgggtacacagcctcggcggcgacgatcatcgcgcaggccgcgtcgcccggctgccgcgaaatatcggccaacgccctctacctgatacacacggccgtctgcgccaccgaaggcaacgccgccgagctgaacggcaaactcgacctgctgcgccagaccgacgcgcgcatcgccgcagtctatgccgcccgttcgggacgcccggcggccgagttcgaaaccctgatggcagaaaacaacggcaacggccgctggctgtcgcccgaagagaccgtcgcggccggtctggccgacgtcgtgaccgatgcggcggggcatcccgccccctcgctgacgcgaaacatcgcccgcggctgggaacgcctgctcatccgcatcggtctcagcgccggagagcagctgcccgcggaccgggaccgcaacgtcctccacaccgaaggagaagagcgggagctgctccgccgctccgccgccgcggtgcgtcaggcgcagcagcgggtcgtccccacgcaaacccggccccgcgaggatccctcctacggcgacctcgtgcggacagccaaccaacgcgcctactccgaagacgcgaaacgtctgcgcaacatgtaaaaccgggagagtcccacagaaaaaggctccccgaccattcgaacaaccaccaaaatcatttcaaccatgagtttcttagaaaacgccaagcagtacaccggttccgacctcgaaaacatcttcttccgtcccatcctgagcggcccttcggccggcgaactgggcgtgagggtcctctacaacatgcccgtcccgacgaccatccagctctgggaagggcaacgcaacgtcctccagaagtacaccgccgcagggtggtccgggggcagcgccgccaacaaactgcagaaaaccatcgctctgagccgcgtgaaggccgagctgggattctcggccgccgactacttctcgctggtatacgagaaaatcgcggcgcgcgccgacgtcaatatggacgacctgacgggcagcgagctggagcaggccgaaacctcgctcttcaagcaggccatcgccgagggaatccgcgccacgatgtgggtcggcgacacgacggccgcttcgggcttcaacaccttcgacggcttcctcaaaagcgtcaaggcaggcgccgagcaggagcggttccacaattcggtctacgaagccgccgacttcaccaatcccgaaaagatcgtcgcgatcctcgacgacctctggcagaacgccgacgaacgtatcaaggaccgcaaagccgaaggccagctcgccttcttcgtcacctcggatctctactacgcctacgaaaagtacctcgacagcaagggcgccgacgcggcctacgccgaaagcaccaacggccgtcagggactggcctaccacggcatcccgctcgtcgacgtccgtctgggggcctatctgtccgacacctcgctccacaagtcgttctgcctgctgaccgaccgccgcaatctcgtactggccgtcaacacgtccgactttccgggcaacgaagtgcgcatgtggtacaaccccgacctgatggagaaccgccagcgcgccgtcttcatggccggatgcgacgtgatcgacgagacgatgctctcttacgcattccgggtatagcgatgacagcgtccacaccccgcaaacccgccggcggcatcacggccgccgcgatcacccccgcaggaaatctcctgcgggcggcgctgggggccgacgggcgcgccgaagcggtattccgcgacgggacgctgctcacgcggctgccgctcgccgaacaacgctcctcctataccgagctgagcgacacccaagccggaccgcagcgcgtgcgtcatacgctgaagctcgtcgtcagccgcgaagcggcccgcacgcttttcggcccggcattccgtcgcacggccgcgaccgaggggctgatcgcaaccgtcacggccgcatcgggcgaacggctgctgatcggctggtcggcccggctggggagagaacaacccctgcggctcggctcggtgagcaacgaatcgggcgtaaaacccctcgacggcacgccggtcgtcgtgaccctcacctgcgaggacaccgacccggccccggaactcaaacaacaggaaccatgagcaaaaagcacaaaatcaaaccggccgtcgcggtgaacaaccgcacggtcgatccctacatcacgctcggcgcgggacgtgtcgaaaacgacgcgttctggcgctggggcgacgacaacctctttcccaacgcgctggcgctgatggcacgccgttcggtgacccaccgccgcatcatcaacgacaaggccgactacatttcgggcaagggcttcacgtgcgacgaggtgcagcagccccggctcgcggccttcctgcgccacgtaaacggcgacggggagagcctgcggcaggtgctcaacaagctggcgttcgacaaggcgctcttcggcaacgcatttctcgaagcggtgaccgacgccgggcatacgttcctttcgctgcaccatcaggacgcctcgcgctgccggctggcccgcgactcggcccacgttctgctccaccacgactggacggcattcaaagcggccgaagcgcggaccctgcccctctacccggcattcgaagagcagtccgacggcacgctgcgcgccgtgatccactacaaggactacgaaccgacgttcgaacattacggcgtgccgccctacatcgcggggttcaacgtctcggccatcgcctacaagaccgacaagtggaatatctcgcggctcgacaactcgttccagctctccggcgtgatgatgctcgacagtacggtggacagcgaagccgaagccgaacgcatcgtacggctggccgagcagaaattcgcgggcaaccccggacaggtgatgttcgtcatccgcgacggcggcgagcagaacgacaattcgcgttttattccgatcgcatcgcagaacgagggcgactggcaggcgctgcacgagcaggccgtgtcggacatcgtcgtggcccactcgtggttccggaccctgagcggactggaatatgcttcgggattcagcgccgaacgcatcctgcacgagtacgaagtggccctcaacacggtcatcctcggcgagcaggccgaactgaccgagccgatccgccagctcctgacatccgtatcgggattcgacacgtcgtcgctgcaaatcgtaaaccgtccgccgacacgctccaagccgatctacatgaaggtctgggaggcccgcaaggccgacggactggagtatgatcccgacgacgagcgccagcaggcgtttctgtccgagatcacgaagtataatatcaggagcatagaataagacctgattctccgggtgctttcgaaactttctgttcgccgccttcggcgtcgtttacaagtccgacccgcccctgaatccccgcccggcggggagttgccgcacgcggccaagacgacgcaaaggttgtcttgcttttcccgctccagcacgctgttgtcgcgtttgtagttatgacgcccccgcgggaacttccgcaccgctttcagcgatattcgaaaatcatttcaattacaacaaccatgaacacacttatcacccccgcgcaggccgtcgcgctggccttcgccgacggggagtatctcgcaccggagagcgtcacgcagagcgacatcgccgcggccgaacagcgctacctcgtcccggtcatcgggcggctgctgtacgagaagcttctctcaggctcgcacgccggcttcacgaccgaatatcttgcggctccggcggcgcttttcacgcgcatcgccctccagccgcggctcgacgtccgcaccgggcagtgcggcaccgtcgcgcccaaatccgccgcctaccagcccgcaggcacgcaggccctgcgcgagctgcaacggagcctgcgccgtcaggcccggacgctgctgcgccgcgccgccgaacacctcgaaacgcacgccgccgaatttccggaatacgacccgcacaagaacatcctcaaccgctgtacgaccgatggaaactttgtacagactcgttagcggtgcggcggcggggatcgccgccctgttcgccccgatcgggccgctcgtggcctgcgccgtggtcttcatcggcatcgacttcctgtcaggcgtcgccgccagccgcgcggcggcccgccgcgaaggccgcgcatggtatttcgagagccgcgaagcatggcgcacggtcctcaagctggcccttgccattacagcaatcgccatggcgtggctgatcgacagctgcatcctcgacttcatggagctgaacgtcgcgcggctcttcacgggcttcacgtgcggcgtggagctgtggtcgttcctcgaaaacgcgtcgcagctctccgacgccccgctgttccgctggctgcgccgctacgtacgccgccgcatccggagagagacgggcgatgagtagggggctgagcaaccggaaccccggcaatatccggcagtcggcggtccgctacaaaggcgaggtgcggccctcgcgcgatccggcgttcaagcagttcgaatccatgccgtgggggtaccgggcgatcttcgtcctcttggacacctaccgcatccgccacggtctggataccatacgcggcatgatctcgcgctgggccccgccttcggagaaccgcacggaaatctacatccgcgcagtcgccgacgccgtgggcattgccgacgaccgtccggtcgacacccgcgaccggacaacgatgctccgcatggcggcggccatttcgcgggtggaaaacggcacggcggccgatatggacgacgtggagcggggttgggagctatttcgccaatagcagcggagagtcccgcccgatccggcgtccgcatgaaaaccttttgcctgaacagcacacaaaacagccctcttttgttatatttgcaggtatgaaacccgaattcctgcttgccaaactcgaccgtatgccgatgctgaaagccgtcgtgccgtttgcggccgggattctcgccgccgaccgtttcgcactgcccctgtggtttctcgcaggggcctttttgctctccggcgtctcggcgctgcttctccggtcgccgctctgcaccctcgccatgctcttcacggcgggattcggcgcggcacagctccgcgataccggacgcacggtaccttacggggtatacacggcctatgaactctccgtcgagggcatccccgccgaccggggccgctatgcttccgccgaagcgaccgtcacggcgtggcgcgacccggccgacggcacgtggcaccccgcaggcgaccgggtgacgctccatgccgacagcctaacggccctgcatccgggcgagcgtctccgctgccggggcacggtccggccgctgcgcggcggcgcggagagttaccgccgcctgatgacgcggcggggattcgcgggaacgatatggctgtcggagcgaaccatactcgaacgattgcccgcccgcaatacggccctgcatctgcatgccgccgaacgaatgggccgtctgagaatccccggcgacgcgggtgccgtctgccgcgccatgacggcgggcgaccggagcggcatcacgcccgaactgcgcgcggcctattcgcgcagcggactgtcgcacctgctggccgtatcgggactgcacacgggcatcgtcttcgcactggtcaatctgctgttgtggtggctgccgctgctgcgcaggggccatctgctgcgcaacctgctggcggcggcctgcatctggatttacgtcgccgcggcgggatttccgcccagcgccgtgagggcggcggtgatgttcacgatgctccagtccgccctcgcctccgcgtcggaatacaacggactgaacgccctcgccgcagccgccttcggcatgctgttgtggaatcccgcatggctcggagacatcagcttccagctctcgtttgcggccgttgcggcgatcctcgcatggggcgtacccctctgccgccggctccgcacccggcggcgggcgctgaacccgattaccgacgcgctggcggtcagcttggcggcgacgctggccacggcgcccctcgtatcgcatacgttcggcatcgtgccgctggcgggagtcgtcgtcaacccggcggcgatcctgctcggaagcgtcgtggtgctggccggcgcgctctggatgctgctgccgttcggatgggcggccccggcattcgaatgcgtgctatcgcacacggccgaaggactcaacgcgctggcgcgcgtcacggcggatctgtcctgcgcagcggcggaatacgccctcggcggaggggcgacggcggccgtttacctctttttcgcgctcgcaacggctgccgcatggtccgccgaaccgaaaaaaagcgtacatttgcccgcatgatgacccccgaagaatacgaactgctgcttacggacgaagtgcagcgggccattgccgtctcccgcggccgcgatccgctggacgtggccctcgaccgcaccgtgccccacgcgcggctggtcgccacgcaggtcaaatacctcgcgcgggcggcatcgaaactgccgtcgtatgccgccgcgcagtgcatactcccgccgctggccttcgagcaggcgtcgagcgaggcgtgtgcggcgcacaaacggatcgacggcgacacggcgctggacctcacctgcggactgggcgtcgatgcgcttttcctgagccgccgtttccggcgcgtggtgacgctcgaacgcagcgaaacgctggcccgtatcgccgccgaaaacttccggcggctccaagccgccaacatagaggtcgtccacacctcggccgaggagtatctgcaacggcccggactgcgcttcgactggattttcgccgaccccgaccgccgctcggccgacggccgcaagctggtgcggctcgaagcgtgctcgcccgacgtcaccgccctgatgccgcttatcgcgcgcgcgtcagggcgtctgtgcatcaagaactcgccgctgttcgacgtggacgaagccctgcggctctttcccgacagccgcgtggaggtcgtctcgctcggcgacgagtgcaaggaggtgctcgtctacgccgacggcacgggtcccgccctcacggcgacggcgctcggccgcggcagtttcacggccacccccggccagacgccgccgcccgcacccgacaccttcgacccgtcgcgctaccgctggctggtcgtgcccgacgtcgcgctgcagaaggcgcggctggcgcggctccacctgcgcggcaaggccgacatctggagcgaaaacggctacggattcgccgccgaagagccgcaggaggtaatcggcaaggtattcgcagtcgaaagcatcgaaccgtacgacccgcggcggctgaaacgcagcctgaaaggagccggagccgagctgatgaaacgcgacttcccgttcggagccgaggagctggcccggcggctgggcgtgcacgcgggagccgacgtgcggctggccttcaccaaaatcggaaacggattttgggcggtccggttgaaatagctatatttgcagcatatcggaatgcgcccggcggcgttcggcgcgcagtccgtttgcaggaatcgtaacagcctatgaaaatcagcgagatattcacctacttcaccgacacgatcttccggcgcgacatcaacgaatggcgcaacccggtcatccggtggctcgtacagcagtaccgcctgctgttctacacggcgcggggcctgctggaacacggcatgatcgtccgcagcgcggccctcacattctatacgctgatgtcgctggtgccgatcgtagcggtggttttcgccgtggtcaagggcttcggactggccgacggactgatcgacaacctctacgccctcttcccgcagaaccccgaaatcatcgactacgtcgtcggtttcgccgaaaaggcgctggcccgcacgcagggcggcgtggtggcggccgtggcgctggtgatgctcttctgggccataatccgggtcttcggctcgatcgaaagcgccttcaacaacatctgggaggtcaaggtcgaacgcagcgtgacgcgccagtacaccgactatatcgccgtggtgatgatcgttccggtgctgtgggtcgtggccaatgccgtaggcaactacacccagcagctgctgggattcgacggcagctggtatttcgacctgctctcgcgcttcgcgtcgatgttcatcatctgggtgatgttcaccatcctgtatatcatcatccccaacaccaaagtcaaattcaagagcgcgctgatggcgggcatcgtcgccggcacgctcttcctgctctttcagtggggctatatctacattcagcggtggatgacctcctataacgccatctacggcagtttcgcggcccttccgctgctgctgatctggctccagacctcgtggcagatcctgctgttcggcggcgagctgtcgttcgcctaccagaatatcgcccgcttcggcgaggagcgcgaatcgctgctgataagctacgaccagcggcgcaagatcctgctggccgtgatgctctccgtggtgcggcacttccgcgaaaagggcggtgcaacgcccgccgacgtgatccgcgcacggctcggactgcccacgcgcatcgtcaacgacgtactctaccagctcgtgcaggccggacagctcatcgccgtgccttcgggcgacggcgaacgcgaagtggccttcgccccggcgcacgacaccgggacgctgaccgtctacggggtgctcgaagcggtcgaagcgtcggggcagacgaccgtcgatctggcccgcaacgccgaactgacccgcatcgaccgggagttggagaacctgaaggaaacggcccgcaaatcgcaggacaacgtgcggctggtggacctgctttaacgaaacgacaaagaaacttatggaacgcgcagtaatcatcggaagcggcaacctcgcggaagcattggcgcaggccgtcgcccgaagcggcctgaaactcgtacagctcttcgcccgcaacgcccagcgcggaaagacggtcgccgcactcgccggcacccaatggacctcggacccggccgggctggccgaagccgacatctacctgatcgcagtaagcgaccgggccgtagcggaagcggccgcttcgctgcccattcccgcgggggccgtcgtggcccacaccgccggaagcgtgccgctcgaagccctgcccgaccgccccacgacgcgccgggccgtcttctatcccctccagaccttcaccaagggccgcgaagtggatttttcgcagattcccgtctttctcgaaaccgacgacgaagccctgcgcccggagctggaagccttcgcccgccgtctctcgcgcacggtgatctgggccgactcggcctgccgggcaaaagcgcatctcgcggcggttttcgcctgcaatttcgtcaatcacatgtacgccgtcgcagagcgcatcgccggcagtgcgggacttccgttcgacgtgctcaagccgctgatcgcccagaccgccgccaaggcgctcgacgcggcctccccggccgacgtgcagacaggtcccgccgtgcgcaacgacaccggaacccgcgcccgccactgcgccctgctcgacgacgacctgcaactcaagaacatctattcaatcataagcaacagcatatgggaaacttcaaagaagatatagcgcgcaccgaagccttcgtcttcgacgtggacggcgtgatgaccgacggcggcatcatccccacactcgacggcgacttcatccgccgctacaacgccaaggacggctatgcgctggcctacgcgatcaaaatgggctacaaggtctgcatcatcaccggaggacgcggcaagaccctcgaaaaccggctgaagatgctgggcgtcacgcgggcctacatcgactgcatggacaagatcagcgccctgcacgaatacttcgccgaggagggcatcgacccccggaacgcaatctacatgggcgacgacatccccgatctggagtgcatgcgcgaagtgggcatcccggtctgcccggccgacgcagccgccgaagtgatcgaagcgtcgcgttacgtctccgaattcaagggcggcgaaggggccgtgcgcgacatcgtcgagcaggtgctccgcgcccgcggcgactgggccaaaaactccgagggcgtgactccctcgtcgctggccgcctcgcggtaagctgccgccgggaacggaggggacggacaaccaagacaaacgggacaagacccgaaaaaggcaggcagcacgcccgcaaacaaaacagccggtcgcatgaccggctgtttccatatccgcaggaaccacatccgcagaagagtctttactgcatccactcgacgttcgccgcgtcgcggaacagcaggttgagcggccgcaccagactctcggcatccggagcgaagatgaaccgcaccttatcgacgggcaccgtcaggaaaaccgtcgagggataaccgccgatcatatcgacgtgatccatcagcgaccagacgaaaatctcgaacggcatctgaccgggaagcagcgtcagacccggaaagtcggtttcgtacgacgccgaagaggtgtcggcgggatgaggcttgaagaaaatgtcgtacgctgcgccgtactgtccgacgatccgcgccacgtaatcgcgctgctgctgttcgctcgcggcgttctgatggctcgttccgatgatgatcaggttgcctttgggagaagcgtcgaacagggcggcgaatttgtcgtaatcgaagcccgccatgtcgtagaacagcctgcgggccgattcggacagtgccgacagcatctcgtagggctgaatatcttcgatctgcatttcacgaagtttgtcggtaatgaacgggcaggagctttcgagcagcgacccgttctgcatcaccaagcgatagccgggacgggtcgcgaggtagtaaggccacgtccacgattcgagttcgaactcggcacgggtttcgggataacgtcccccgtgattccagtcgagcgcctcgacctccgcggcataggtttcccagttctgctgagccgtggccggatcgccgaaatagttgtaaaagttgttgtatgtcgccgttccgtccgaaagcaggctcaccttcacccgcgcggagtcgattccctgcgccacgaaccagtcgtaacccagacggcagcgcaggtcgtccacatagagactgaagacggccgtcggatcggccttgttgatctccagaacacgccgtttcatttcgcggcacatcgcgtccttttcggcttcggtggcatccgaggtccggtcggccgccgtcgtgactttgacatgcggcgggaacttatccgggtcgaacgttctcgaacgcgtataatagaaataactcggtttgtcgtgggacagcacatgcaatccggcatagagggcggcatcgtgccgaatccggcataaaaatagtaatccggcgcgcgtcgtaaccgtccttcggcgcgctctgcgacatgacgaacggcacgatcaggtcctcgctggcaaaagccagctgcgcactgcgggcggggccttcgttccggtcgaaggtcacctcgatctcggaatatcccgccgggccttccgtggcggagagcgtaaaccacttgtccccggcggcggccgtcacgcgccacggcagcgacgaagttacggagatcttgccggcgcgggccagtgcgtcgagcgacagaaaactctcgccggcgttgacaaccagcacgggacgggtcgtttcgtcgtcgctgcacgccgccgatcccgcgatcagggccagacaaaggagggccgaaaacaatcttttcatagcgaatcaaattagcgttactgcccttataaacgctgcaaaagcccttttactgcatcccgcgaccgatttccgtctgaaaaattaagccgcacggaatgccgtgcggcttttatccgatgcagcagacgtcattcgcctttgcgtttcttgatccggtccaaatgctcgcgcacccgtttgcggaaaagctcgcggcggtactgcagattggcctgccaccccagccagcgggtataacgctcccgtttttcgggatagatgtcgcgtatcgtgaccagaatgcccgtctcctcgacaccgccgaaatcgggattcgacaccgtatcgaaaacccgcatcgtgggcgaaaggttcatgtatgcgttgatcagcggcggaatgttctcgttgaactcgcggattttctgaatcagaatgcggtaattctcctgataggtctgccccgtgaagagctgctcgtaataagggtcgtccagatcgagccggagcggatggatgccctcgacgaggttgtcccggtcggggaagtaacggcgcaggaaccagatcagggcgttgcgggccacagccttgtaggtcgtgtacatcgtcaccttgccgaaaaggtatttggcgcgggggtccagcacgatcagcgcaccgagcccgtcccagaggttgtccagcgcataaatgcttttggcgttgccgcgcgcctgataggagggctgcacgaacgaacggcccagttcgatggtgcggggcaggtatttgcggcggaacttgtcgctgaagcggaaatagtgttcggtcgagagatgccgcggatattcgtccgtgcagatgatgaaacggtagccgccgacgatctcttcggcggcggggtcccacacgatcagctggtagtagccgtcctcggccagatcttcggcgtcgatgtccagctccttgcccgtgccgccacccgcgccgcggaacgcgatttcgcgcaggcggccgatctcgcgcatcagcgacggacactcggcggccgagaagatataaatctcgttcccggccttcttcgtatcgcgggccttgcgctccggcgtcagttcggcgcggagctgttccctttcaacgggaggtatgatggcttccatctgtctctgttgcatataactggggcaaaaataccgattttagcgtttttccggttccggcgcgagcatattttccaaaaaatacgcctttttgcgtacgaattcggcctgctcgcggagtccgccgtaacgctgcagctcggagacgggaatcgggtcgcccacgaaaatgcggaagtgccggcccttttgggaaaacatttcgtcgggcagccagagcatctcgatattgagcttcagccccagcatcacgcgcagccgggccacgcggtagaagaagttcgacagccgtccttcgacgaacaccggcacgatctcgcgctgcgaagcgtaggcctttttcaggaagttggttttccacggcaggtcggtcacctcgcccccgatgcagcgcgagcagagccccgccgggaaggtcaggatcggcacttcgccgacgaactcctcgtcgaatttgcgggcgtaggcgctgttctgcgaaccgtgcttgttcaccggaatccacagcggccgcagcggttcgaggtgcatcagcaggtcgttgaccaccacgcgggcgtcgccgaagcggtctatcagcttgtcggcgagcatcatgccgtccatgccgccgaaaggatggttcgcggcgaacagatagcggcccttgggatcgagcttttcgagcccctcgaccgtataggtcacctgccactccctgaagcaggcgcggataaactcctgcgggggcaggttccagtagtgttcgaggatataattgatctccgactcgtgaatcgtgcggcggagccagccgatgacgaagccgggaatccagcgggccagccgcggggctttgtcggcaagtactgctccgatatctattctgggcataaagacgtacaaaaaattatatccacaaatataggtattctttttcgaaaaatccctaactttacacccaaatcgaccttgtcagcaacgaatatgtctcagtatcatacacctgtccttctggaggagtccgtagacctgctcgccgtagaccctgcgggcacttacgtggacctcactttcggcgggggcggccattcgcgccgcatcctcgaaaagctgggtcccggcgggagactctacgctttcgatcaggaccgcgacacacgcgcgaactgtcccgacgacgggcggttccactacgtcgagagcaacttccgctttctgcgcggggcgctgcggctgcgggaggtggagcaggtggacggcattctggccgatctgggcgtctcgtcgcaccatttcgacgccgtggagcggggtttctcgttccggggcgaagcgccgctggacatgcgcatgaaccagcggggcgcgctgacggcggcccgcgtcgtgaacggctatccggccgacgcgctgacgcgtctgctgggagactggggcgagctggagaccccgtggaaaatcgccaactgcatcgtccgggcacgggaagccgcaccgatcgagaccacggcgcagctggtcgaggccgtgaagccctgcaccccgaaaaaagacgagtcgaagttcctgaccaagctttttcaggcgctgcgcatcgaggtcaacggcgaaatggaggcgctcaaaatggcgctggagcagagtctcaaggtactgcgtcccggcgggcggctggtcgtcatctcgtaccactcgctcgaagaccggctggtcaagaacttcctgcgcagcgggaatttctcaggctcggtggagaaagactttttcggacgcgccctcacgccgttcgaactcataacgcgcaaggccgtggtccccacggccgaagagttggaacgcaacccccggtcgcgctcggccaagctgcgcgcggccgcaaaacgggagaacgaataacggagggcggaggccgccgcgaatcattcaacgacaaaagcagcagagaaggatgttcaaggaccacgaattcgacccggtaacccccgaagaggaggcccgccgcaggcaggaggaggaattcgcccgccgcgtgcggcgcgaggtgctgcgcatcgagcggggcgaagccgacgaggacatccgcgccgacatggaacgcgaagaggaggagaaggccgaagaggaggagcgccagcgccgggagcgccgccgcaaggccagcaccttctggcagctcttctcaggtacgatcctcgtccacgagggagtctcgaaatactatccctacatgctctcgatcgcgggcatgttctttttgagcatcgccgtgatgttcaccaccctgcatctggacatgaaatactcgcgcctcgaacgcgaagtgcagatcctgcgcgaacgctcgatccgcctgcaggaacagcgttaccgccgcaccacccactcggccatcgtcgaacggctgcgcgaacgcggcatcgagcttatcgacccgccggcgccgggcgaaatcatcgaaaactgacggacgatgaaagaggaacgttcgaagatcaaaagcgacattctgctgcgggtacggctgctttacgtgctgttcatactcgccggggccgtcgtgctcggacgattggtctgggtgcagctcttcagttccgaagtggcctacaacgccgaacggctggccagccgcatcttcaccgaggagaccattccggcgcagcgcggcagcatcctctcgcgcggcggcgcgccgctggcgacttcgatcttccgctatcaggccgccttcgacttcgcttcgccgggtctcgattcgctgaaaaccttccgcgaacagagcgactcgctggccaaactcctcgcggcgttcttccgggacaagtccgccgccgaatacagccgcaaattccgcgaggagcacgcccgccactaccggctcgtcaacggacgcgacacgacctacctgcgctccgaagggtggttctcgcgcctgatggaccgtctgcgcggcgaagagtttgccacgcgccgcatctacgacaccatccgcgaccacacgcccgtcaatatcttcccccgcgaagtggactacgccgaatggcagaccctgcggcgttatccgctgctgaactggaacatgggcatggtctaccggctcgtcgaacgcgaccagcgggtctacccgcagggcgaactggcgcgccgcacgatcggactgacgggcgacaagggaaattacggcatcgaggaggcctaccgcgaagagcttgcgggccgcgacggcaaagccttgcggcaacgcatcgccagaggcttctacggccgcgtcgcgggcggcggccacgaggaccccgaagacggctacgacgtggtgaccacgctcgatctggacctgcaggacgtcgccgacaaggcgctgcggcgccagctagaagctcagaacgccatctggggcacgacgatcgtcatggaggtccatacgggcgaaatcctcgccatggccaatctgggccgggctggaaccgaaggggcattttacgaacgcgagaattacgcgctggggcgcagcatggagccgggttcgaccttcaagctggcgacgatgctcacgctgctcgacgacgccgacatgtctccccagaccgcctacgacacccacaacggcgacccggtgaccgtaggcccggccaagaatatccgcgactcgcaccgcggcgaccacgtcatcgacttccgccgcgccgtggcttcgtcgtcgaacgtctacttcgccaaggcgatctgggagcgttacggcatcacgggcaagaagcaggagtacagcgacttcctccacgaaaaactacgtctcggacagaccgtcggactggaacggctgggcgagcgcgccccgtcgatcaccaccgactggaaagttcccgatccgggcgtcatgctggtcaagatgagctacggctaccgcgtgcggctggctccgatccagatgatcaccttctacaacgccatcgccaacggcggcaaaatgatctcacccgtgctggtgcgcgaactgcggcgcggcgaccgcgtcgaggagcggttcgaaagccgcaccctcgcctcgtcgatctgctcgcgctcggcgctgcgcgaggtgcagcggtgtctcgaactggtctgcacagagggtaccgccagcctctatttcagggacaccgcccggctgcgcgtggccgccaagaccggcacggcgcagatcaccgacgcccgcagccgcgaaggccgctactacctcggctcgatgatcgcctacttcccggccgacaacccccgctacacggtgctgacgaccatcgaaacccgtgcgcaggccggcaaggcctattacggaggtccgctggcgggtccggtcgtcaaacgcatggtcgattacatctacaaccgcaaccgcgactggtacggccgcgtcgagcggcacggcccgcgccgccacccagaccggatcaagggcggcgacatcgcccagatccgccgcgtggcggacaagctttcgccccgcgcttcgttcgaccaccgcacgggctggggccgcgtgcaggtggacagcctttcgaacgtggtcatcacgagccttccggccgaaacgggcacgatgcccgacgtgcggggcatgggactcaaggacgcgctgttcgtactcgaaagccgcggcctgaaggtccgcttttcgggccggggagccgtcgtccggcaaagcgtcgctcccggagcgcgcatcacgccgggcgcgacggtcgccataacgctgaactaagatgaaagaactgacgatattcaccccggcgccgcgccgcagggagactttcccggcttccggacgcgttcgcggaagcgcctgcgatccgaattccgcggaccgcggcgacaaagacgcccaaggggcgaatacgacaaaagacaacggtttatgaaaacactgaaagaacttctccgaaatacccccgtcacggcactgcacggcgacgattcggccgccgtcgccgggttggtttacgactcgcgtgccatcgggccgggcgactgcttcttcgccgtgcgcggcacgcagaacgacgggcacgacttcattcccgccgccgtcgcaaaaggcgccgccgccgtcgtctgcgaacgcctgcccgaacagaccgccgcagacgtcacctacgtcgcggtgcccgacgccgcaggcgcgctggccgacatggccgcggcgttctacgaccaccccagccgcgcgctgaaactcgtcggcatcaccggcaccaacggcaagaccacgaccgtgacgctgctgtatgacctcgtacgggcgttgggtcataaggcgggactgatttcgaccgtggtctacaaggtcggcgaacgcaccgtcgaggcgacgcacaccacgcccgaccccgtgcggctcaacgccatgatgcgcgaaatggccgacgaggggtgcgagtactgcttcatggagtgttcgtcgcacgccatcgtgcaggagcgcacgcgcgggctgcacttcgcgggcggcatcttctcgaacatcacccacgaccacctcgactaccacaagaccttcgccgaatacatccgcgccaagaaactcttcttcgactcactctcaaaagaggccttcgcgctgaccaacgccgatgacaaaaacggccgcgtgatggtgcagaacaccgccgcagccatacacacctactcgctgcgctcgatggccgacttccgctgcaagatcgtcgaaatgcacccggacggcatgctgctgcgcatcgacggacaggaggtatgggtcgggctggtgggccgcttcaacgcctacaacctgctggccgtatacggcgcggcggttctgctgggcttcgaccgcggcgaaacgctgcgcgcggcgagcatgctgcacccggtcagcggccgcttcgaactggtccggagcgcaaacggcgtcacggccgtcgtcgattacgcccacacgcccgacgcgctcgaaaacgtgatccgcaccatcgaggagatccgcaccccggcgcagaagctgatcgtcgtctgcggctgcggcggcgaccgcgaccgcaccaagcggcccgaaatggcgcagatcgccgtgcggtacgccgacacggccgtcttcacgtcggacaatccgcgccacgagtcgcccgaagcgattctcgaccagatggcggcgggactcgaacccggcgcgcgcttcctgcgcatcgccgaccgcgccgaagccatccgcacggcggtgatgctctcgcagccgggcgacatcctgctcgtggcgggcaagggccacgaaacctatcagatcgtcggcgacgtgaaacaccccttcgacgaccgggaggaggtccgcaaagcctttgattcattcggtaaataaaacccaacgaacaatatgctctattacatcttcaagtatctggacgaagcctacaacctgcccggttcgggcatgttccagtacatttcgttccgcgccgcggcgtcgatcatcctcgcgctgctgatcgtcatcattttcggccgcaagatcatcgacttcctgcgccgcaagcagatcggcgaagaggtccgcgacctcggtctggagggacagctccagaagcgcggcacccccaccatgggcggcgtgatcatcctgcttgcgattctggttccgatccttctgctcggacggctcgacaacatctacatccagctgatgatcgtctcgaccgtatggctggggctgatcggcggactggacgactacatcaaggttttccgccacaacaaggaggggctcaagggccgtttcaagatcgtgggacaggtcgggctgggcatcatcgtcggcacgacgatgtgcgtgtcgcaggagatcgtcgtccgcgacaaagtcgtacagcccgtacagaccgtctacatgaacgaggacggctccgtgctcgaaaccgtacaccgcaacgtggtcctcagctccgaaagcctcaagaccacccagacgaccattcccttcatcaaagacaacgaattcgattacggctggctcacgggcggcaatacgacgatgacgtggctgctctacgtgctggtcgccatcttcgtggtgacggccgtctccaacggcgccaacctcaccgacggactcgacggactggccacgggagtctcggtgccgatcgtggcggtgctgggcgtactggcttatctctcaggacatatcgtatacgccgactacctcaatatcatgtacatccctgacagcggcgaactggtcgtcttcgccgcggcgctggtcggcgcgctggtcggcttcctttggtacaactccttcccggcgcagatcttcatgggcgacaccggctcgctgtcgatcggcggcatcatcgccgtcttcgccctctgcatccgcaaggagctgctgctgccgctgttgtgcggcgtctttctggtcgaaagcttctcggtgatgatgcaggtcggctacttcaaatacaccaagcgcaaatacggcgaaggccaccgcctgctgctgatggctcccgtacaccaccatttccagaagaagggacagttcgagaccaagatcgtcctgcgtttctggatcatctcgctgctgctggcggccatcaccctcgtaacgttaaagatccggtaatcatgaaaaagatagcagtgctgggcggcggcatcagcggatacggctccgcgatcctcgccaagaagaaagggttcgacgtcttcctctccgatgcggggcggatcgccgaccgctacaaggccaagctcgacgagtggcaggtgccctacgaggagggcggccataccgaagagcgcatcctcgacgccgcggaggtcgtcaagtcgcccggcatccccgaaacggcgccgctggtgcgaaaactccgcgccgcaggcattcccgtgatctccgaaatagagttcgcgggccgctacacgggccgggcgaagtgcatctgcatcaccggctcgaacggcaaaactaccaccacgtcgctcatatacaagatcatgcgcgacgccgggatgcgggtcgctctgggcggcaacatcggcgagagcttcgcctactcggtcgccacgggcgattacgactggtacgtgctggagctgagctcgttccagctcgacggcatgtacaagttccgggcgcatatcggcgtgctgatgaacatcacgcccgaccacctcgaccgctacgaccactgtttccagaactacgccgattcgaaaatgcgcatcacgcagaaccagacttcgcgcgactatttcgtctattcgggcgacgacgaagtgatctggcagcagcttccgaaatacgacctgcgcatgaagcagctccctttcgcggcgaaaaatgctgtggccagcggcgcgggggacgctttcctctgcgacggcaaattcacggcggccgtcggaaaggcctcggtcgagatcgacaccgcgaaactgcagatcaagggcctgcacaacgcctacaacgccatggcggcggcgctcgcaaccctcgcggcaggaatcgctccggcggcgatccgccgttcgctctacggcttcgcgcccgtcgagcaccggctcgaaccggtcaaggagagcggcggcgtgctgtggatcaacgactcgaaggccaccaacgtcgattcggtctactatgcgctcgaaagcatgaaacgccccgtggtgtggatcgccggcggtacggacaagggcaacgattacgggccgctcaaggatttcgcccgcgagaaggtgcacacgctcgtctgcatgggcatagacaacgccaaactgctccgggagttcacgggcgtcgtgcccgaagtgatctccaccgattcgctcgacgccgcgatgacggcggccaaagccgccgcacggcccggcgacgcggtgctgttgtccccggcctgcgcaagcttcgaccttttcaaaaattacgagaaccgcggcgagctgttcaaggcgtgggtaaacgaaaaggcataaggcgatgaaattcggcgaacggaaacagacacagggcgcgcagcaggcgcaggaaccttggtcggaaacggccgggaacgctccgcgcacggccggagcggcggccgcagagactgctccgcacggtagcgaggggcggggcggccggggcaagagccgatccggagccgagtacgggaccgctgcggacgaggaaaacccgcaggcggcgaacgcgtgcggcgaaacggccgaaaagcccaaattcaggcttttcacgggcgaccgcgtgttgtggatcatcatcgcggtgctggcggtggtttcggtgctggtggtctactcctcgacggccaaaatggcttacgacgcccacacggcccgcaccacggcgcatttcctgcgccagcagctgatgatcctgatcgtcagtctcgtcgtgatggtcgccgtgcagaagatcaactgccgcatctacaacctcttttcgcgccccgtctacatcctttcggtcctgctgaccgtcgccgtctacttcatcggcgccacgaccaacggcgccgcccgctggattccgctgggacccttccagttccagccctccgaagcgctgaaggtcgccacagtgctcttcctcgccagccagctggcgggacgccagtcgaagatcgacaaaatccgcatcgtgccgtcgctcaggttctggacatggcgttcgtcgcgcgaacagcgccgcatctggcgcgaagggacatggccgatcctgatgcccgtggtcgtctcgtgcaccgtgatcttcccggcccacacctcgtcggccgtgctggtgttcctcgcctcgtgggtgatgatgctcatcgggcgcgtccgtttcggcgaactgatgaagctcgtcgggctggcctgcgtgggcatcgtcctcattatgacgctcaacctcggccgcagcgaaaccgccgaagggcgcgtctcgacatggatacacctctggacccgttcgcagaccgacaagccgatcgaacacctcaccgacaccgagcgttcgatgatcgccatctacaacggcggcatcttcggtgagggagccggacagagcgccatgcgcgtggagatgatccaccccgaaagcgactacgcctacgccttcttcgtcgaggagtacggcatcgtgctggccatcgcgctgctgatgctctatctgtggatcttcttccgcggaatcgaaatcttccggcggtgcggcacggcctttccgggactgctggtgctgggactggcgctgctgataacctgtcaggcgctgctgcacatcatggtgacggtaaacctgatccccgaaacggggcagacgctgcccctgatttcgcgcggcggctcctcgacgctcttcaccaccatcgctctgggcatgatcctcagcgtcagccgtcagaacgacgaacagtcgcacgacacgccccgcagcgaatccatttatgaaaagtaacgacctatggacgacatcagactggacaaatacctctgggccgtgcgggtgttcaagacccgcagcgacgccgcagacgccgtccgcaacaacaaggtgaccgtgaacggcgcctacgccaaaccttcacgcgaagtcaagatcggcgacgtgatcgccgtacgccggatgcaggtgacctattcctacaaggtcctcgacctcgtgtcgagccgccagccggccaagaacgtttccctgtactgcctcaacgtcacgccgcaggaggagctggacaaactcaacgttccgcgcgagaccgtcttcgtattccgcgaccgcggcacgggccgccccaccaagaaggagcgccgcgagctggacggcctgatggacgaactctattacgacgaggagtaggcgcacaccccgctgcggggccgcgacatgccggcaacggctatccgccgcccaagacgccgcccgaaggcggcaggccggccattccgccaaccgcccgacgctccgcccccgaaatcacgccgcattcgccgtgtccacaccgcacggcgcgatttccacggcgaaactgccgaaaacgacaagattcctgcggaatacacaaaaacgaaaaaccgggcctttccgtgcaagcacgaaagcccggtttcccgtttcatatgccggcaggcatctattcttgttttcggctacttcttgttgaagaagttcatcgtccgttccatgccgatcgtggcgaacgacagaatcgcgtcgcagaagactttgagccgttcaggcatcgccttccggtcctcttcgctccactcgcccagcacgtaatcgacctgatgccccttcgggaagtcgccgcccacgccgaagcgcatccgggcgaaattctccgttcccaagagttcggcgatattcttcaagccgttatgccctccggcgctccccttcgggcgcagccgcagcgtaccgaacggcagtgcgatatcgtccgaaacgaccagcagattctccggggcgaccttttcggcctccatccaatagcggacggccttgcccgaaagattcatataggtcgagggtttgagcagaatcagcgtgcggcccttgtgtttcacttgggccacatcgccgtaacgcgccgtggtaaaaacagcgttggacgcctctgcgagggcgtccaacacattgaatccgatgttgtgtcgggtcccggcatattcggcgccgatatttcccagcccaacaataagatatttcatacgctaccgactaatcctgagccgcagcgccgcgcgaagcacgggttacgcgaacggcgcagacagcggtggttgcgggagtaacgaatttcaggttctcgaacttgaggtcgcccacgaagatcgtcttgccgacgcccagcgtggtcacgtctacgaccagttcgtcgggcaggttctcgaccagcgcgctgacgaccagcttgcgggccgacagagccagcttaccgccgaccttcacaccctcggcgttacccgtcaggcgtaccggaatcgcgatcgaaacgggcttgccgtcggcgatacggtagaagtcgaggtgcaggatctgctcgcggacggggtggaactgagcctcacgcagcacggcctgctccttcttgccgtcgaaatcgaactcgacgatgtaggagttgggggtgtagatcaggggtttgatctcgcgggggtccaccgagaaggcgaccgactcgccgtggcccgacagtacgcagggaaccatgccctcgcggcgtacggccttggctgctttcttgccgtactcttcacgctttacggcctttacagaaatggttttcattgcaatttgtttttaatgtgttaccttgggcggttctcagcgagacctcgcgggccgcgccccaattccgcctgtttcggagcgcaaagataagccaaattatcaagaatcaaaaaccggacgcggaaaattcgccctcggagcagaaaaatttcggattcggatttaactttcgcacctttgatgcgtcttattgacaaaccctcatggagacgacccgcgacatatcggcagaagagcttgcggcgctgcgcgaccccggcgtccggcacggggccttcgaccggctggtcggggcgtacctccgtccactttactggcatgcgcggcggctggtggtggtccacgaagacgccgaggacgtggtgcaggagaccttcgtccgggcatacgacaggatcggcaccttccggggcgggagcgacgagatgggggcatggctctaccgcatcgccacgaacacggccctgacgctgctccgacggcgcaaaacgggactgttcgcctcgctcgacgaagtgagccggacactggcgggccgcgtggcggaagagtgcggcgaggacgccgaccaaatgcaggtgcgtttccagcaggccgtgctggaactgccgctcaagcagcgtctggtcttcaacctccgctattacgacgggatgtcctacggacagatagcccgcgtgctgggacagcgcgaacagacgctcaaggtcaattaccactatgcagtacagaaactgaaagaaaaactaacgcaggaaatatgaaccgtgaatttgaaaacagcggccgggaaatgccttaccgcatcccgccgcagagtctcgaagcgctgcacgagcgcatcctcagccggacctcccgccgcccggcatcacctccccggaccgtccgcagatactgcctgacggccgccgcggcggctgccgtgctcgtcatgggcctgctcgttaccgaataccgcacccgcagggccgacacaccggccccggacctcgaacagatgctcgccacgaccccggccgagacgctgcgtcaggccgccgcggagaattacgacgacatcctttacaaccagcaactctaaaaacatttcagctatgaaacatatcctgcttttcctctgcaccctgctgttcgccctgacgggaaacaccgcaccggcctgcaacgaatcggaacaactgctggccgaggcccgcacagcgacgaacgccgcggggagcgtctcctccggcgaactggaacgcgccatggccgaagcccggcggaccatggaggcgaccggccgggagatcgaacgcgccgtggccgaagcgcgccgtgcgacggagctctccgaccgtgaaatcgcgcgcgccgcggccgaagcccggcaggccatcgatgcggcggaacgcatcgacttggccaaccagtcgctcgaagagctgaacaaggcggcccgcgaacagatcgtccgcgagctggggctgagcacccgccagcgcagggagttcgagccgatctacaaggcctaccgcgaagcgctcgacaaagccgtcgacgcccgtgccggcgcttccggcgccgacgaagccacgcagaaaaacagcctgaaggccaaactctcgaacatcgccgccacggcgcaggtcaagcgcgactatgtggacaaattcgccgccgtgctcaccgccgagcagatccgccggctctacaacaccgaaggcgagatcggcaccaacatcaagcgggccgccttcgaccggagcagccgcacccgcagcggacggctcaaaggcagcggacgcatggtgacgcaggactggggcaaggcgggcgactacacgggcatctcggccgcggcgttcttcgacatcaccgtcagccccgcggccaaaaccatcagcgtgacggccgacgacaacgtcatcgactatctggtgctggagcgcgacggcgggaagctgaaattccgcgtcaacgccaacagcacggaaaacatctcggtctcggtcaccgttcccgcatcggcctcgctgcgcgaaatatcggcaggctcctacggcaaggtgaactgcaaaatgccgctgaaaggtccgtcggtttcggtctccgtatcgagctacggatcggtgagcgccgacatcgacacgcccggcgccgcgaaactcgacgtgtcgagctacggcaaattcgcaggctcggtgcgctgcagcgacggcgagctgcggatttcgagctacggatcggcgcaggctcccgtggagtgccgcaacagctgcaaactgacagtgggcagttacgccaaattctcgaacgacatcaaagcctccgacctcacggtcgaggtcagcagcggcgccagcgtcggcagtacgctgaccgccgacgcgctgacgatgcgcatcgacagctacgccaaattctccggcacggtgacggtaaacgcccggcaggcgaagctgaccgtcagcagcggcggctcgttcaacgggacattcagcggcagttcgctcgaagcgagcgtcggaagctacggcaaaatctacctgaaaggcgcggcgcaggtcgccgacgccacggtccgggtctcgtcgggcgcgaatttctcggcccccgaactgcgggtctcggattacgacctgacggtgtcgaactacgccaaagccgacgtctggtgttcgggccgtctgaaaatcaacgcttcgacagccgccaaagtgacgtacggcggtccctgcacggtcgaaaccgtctccgacaacatccagcgcagaaagtaaatgccaacaaccataagcgtatttacggaaacgggccgctcttcggggagcggcccgtcgtttttccccgcttccggctcgaatccggccttcggaagagatttcccgcaacaaatcggcggccgtgcgacaaattccgaaaggttataatccgtaagcgctcccggcccaaagccgccggactttcgccggatgctctcccccggcgccgaatctgtaatgaaaaccccgcccgaacgcactccggcgcgggcggcgcggcaaacgaaacttgcgcagaatgaagggattcggaaatatttttaatatatttgttgccaaggttagttagatcaagtcctattatgtgcgaaaaactttttattttcgacaccacgctccgcgacggcgagcaggtgccgggctgtcagttgaacaccaccgagaagatcgaagtcgccaagctcctcgaaagtctcggcgtggacatcatcgaagcgggattcccgatttccagccccggagacttcaactccgtacttgaaatttcgaaggccatttcggccccgacgatctgcgcgctcacccgcgccgtgaaaaaagacatcgacgtcgccgccgacgccctgcgactggccaagcacaagcgcatacacaccggaatcggcgtatcgccccagcatatctacgacaaactgcgctcgacacccgaaaagatcatcgaatcggccgtcgaggcggtgaaatacgccaagcgctacgtcgaggacgtcgagttctacgccgaagacgccgggcgcgccgatccggaatacctcgcccgcgtgatcgaagcggtcatcgcggccggcgccacggtggtcaacattcccgacaccacgggctactgcctgcccggcgagtacggcgcgaagatcaaatacctcgtcgatcacgtctccaacatcgaccgggcgatcatctcgacccactgccacaacgatctgggcatggccacggccaacaccctgagcggcatcctcaacggcgcgcggcaggccgaggtgacgatcaacggcatcggcgaacgcgcgggcaacacctcgctcgaagaggtggtgatgaccctgcgctgccacaaggagctgaacgtcgatacgaacatcgacgcacagctcatcaccaaggcttcgcacctcgtgtcgagcctgatgaacatgcccgtacagcccaacaaggcgatcgtcggccgcaacgccttcgcccactcgtcgggcatccatcaggacggcgtgctgaaagaccgccagacctacgagatcatcgacccgcaggacgtcgggctcaaccagtcggtcatcgccctgacggcccgcagcggccgcgcggcgctcgtgcaccggctcgaactgctcggctacaacctcacgcaggaagagctggacgacacctacgccaagttcctcgaactggccgacaggaagaaggagatccacgattacgacctgctgtatctggtgggcgacatcgaccgcatgaaacaacagtccctgtctctcaaattcctgcaggtgaccaccggaacgctcgttccgacggcgaccgtggtgctgaagttcggcgaccacgagcgcatggccatcgccacgggcaacggtccggtggatgcggccgtttcggccatcaagaccctcatcaacgagaaggtcgtgctcacggagttcctcatgcaggccatcaccaaggggtcgaacgacgtgggccgcgtacacgtgcaggtgcagtgcggcagccgcacggtccacggattcgccgcacataccgacaccacacgggcgtcgatcgaagcgttcctcgacgcgctgcgcatactgaacgtaaccgaacgcaaggaaaaggaggcgtaagatgggaaagactcttctggacaaaatatgggatgcgcacaccgtgcgcaccgaagacgggggacgctgcgtgctctacatcgaccggcagtacatccacgaggtgacgtcgcccgtggctttcgccggactcgaacggcgcggcatcggcgtggcgcgtccggcgcagatcacggcgacggccgaccacaacatccccaccgtcgaccagcacctgccgatcgccgagccggaatcgcggcggcaggtcgaagcgctggcggccaactgcgcccggttcggcatcgagcatttcggcgtgggcgacccccggcagggcatcgtgcacatcatcggtcccgaactgggcttcacccagccgggcatgaccatcgtctgcggcgacagccacacctcgacgcacggggcgctgggcgccgtggcgttcggcgtggggacgtcggaggtcgaaatggtcttcgccagccagtgcatcatccagtccaagccgcggagcatgcgcatcaccgtggacgggacgcttcggccgggcgtcgaagccaaggacatcatcctctacatcatctcccggctgaccgcttcgggcggcacgggctatttcatcgaattcgccggcgaagcgatccgctccctctcgatggaggggcgcatgaccgtctgcaacatgagcatcgaatgcggggcgcggggcggcatgatcgcccccgaccagaccacgttcgactacctccgtggccgcgaacgcgcgccgcagggcgccgctttcgaccgggccgcggcccgctggcgcgaactttacagcgacgccgacgcggttttcgacaaggaataccgcttcgacgccgccgacatcgccccgatgatcacctacggcaccaaccccggcatggggatggccgtcgatgcggcgattcccgccgacgccgacgacaaggcgttgaaatacatgggattcgaatccggcgaaacactgcagggcaaacccgtcgattacgtcttcgtcggcagctgcaccaacggccgcatcgaggacctgcgccttttcgcacggctggtcgaaggccgccgcaaggccgacaacataacggcgtggatcgtccccggctcgaaaggcgtcgaagccgccgcaagggccgaggggctggaccggattctggccgacgcgggattcgaactccgccagccgggctgttcggcctgtctggcgatgaacgccgacaagattccggcgggcaaatactgcgtttcgacctcgaaccgcaatttcgaagggcgtcagggtccgggcgcacggacgatgctttcgggcatcgcggcggccgccgccgctgccgtctgcgggcgcatcgaagacccgcgcaaggtgtttgaaatgtaaaagtcaagaaaaatgtccatacccaaattcgaaactttcacgtcgggggcgatgcccgtccgcacggaaaacatagataccgaccagatcatcccggcgcgctttctcaaagccaccgagcgcaaaggcttcggcgacaacctcttccgcgactggcgttacgacgccgagggtcggaaggtcgcttcgttcccgctcaacgacagccgctacgggggccgcatactggtcgcaggccgcaacttcgggtgcggcagttcgcgcgaacacgccgcatgggccatcgccgactacggcttccgcgtcgtggtgtcgagtttcttcgccgacatcttccgcaacaacgccctcaacaacggtctgctgccgatcacggtgagcgacgacttcctcgcagcgatcttcgccgccatagacgacgatcccgcggcccgtttcacggtcgatctggaggggcagacgctgaccgccgaagccacgggccgcagcgagcggttcgagatcgacgcctacaagaaacgctgcctgcagaacggctacgacgacgtggattacctgtgcagcatctccgaccagatccgacggttcgaagaggcccgaaaatagccccgcgacgatgcttcccccggtcgaaataatggataccacgctgcgcgacggcgagcagacgtcgggcgtttcgttcaacgcccgcgaaaagctctccatcgcccggctgctgctggaggaactgcgcgtcagccgcatcgagatcgcttcggcgcgggtctcgcagggcgagcaggaggccgtgcggcgcatcgccgagtgggccgcctccaaaggctattcggaccgcatcgaggcgctgggattcatcgacggcggcatatccctcgactggctcggcgacgccggatgccgcgttgtgaacctgctgaccaaagggtcgctcaagcactgccgcgagcagctccgccgcacgcccgaagagcacctcggcgacatccgcgctacgatcgacaaggccgtcgcgcggggcatgcgggtaaacatctatctggaagactggtccaacggcatgcagcattcgccggagtacgtctacgccatgctcgacgcactggccgacgcccccgtgcagcgtttcatgtgccccgacacgctgggcgtgctcgatccctacgccaccgaacggttctgcggcgatctggtgcggcgctatccccgcctgcgcttcgacttccacgcccacaacgactacgatctggccgtcgccaataccgccgcggccgtgaaagccggattccacggggtccacgtcacggtaaacgggctgggcgagcgggccgggaacgcaccgctgtcgagtacggtcgccgtcctgcacgaccgcctgcaccgcgccaccggcatcgacgagacgaagatcaaccacgtcagccgcatggtcgagacctacaccggcatccgcattcccgccaaccgcccgatcgtcggcgaaagcgtcttcacgcagtgcgccggcatccacgccgacggcgacaacaagaacaacctctacttcaacgaactgcttcccgaacggttcggccgcgtccgcgaatacgccctcggcaagacttcgggcaaggccaacatcatgaagaacctcgaaacgctgggcatcgacctcgacgaagcctcgatgcgcaaggtgaccgaacgggtcgtggagctgagcgacaagaaggagctggtgaccgccgaggacctgccctacatcattgccgacgtactgcgttacgatctggccgaaaatccggtccgcatcctcaactacagcctttcgctggcgcaggggctgcatcccgcggcttcgctcaagatcgagatcaacggacgggagtacgagcagacctcggccggcgacggccagtacgacgccttcatgcgggcgctgcggcaaatctacgagcaccagctccggcgcgagttcccgatgctgcgcaactacaccgtctcgatcccgcccggcggccgcaccgacgccttcgtgcagaccatcatcacgtgggaaatgggcggcaaggtattcaaaacgcgcggtctggatgccgaccagaccgaagccgctatcaaggcgacgatcaaaatgctgaacataatcgaaacaaactataacgaccatgaatgttaacatagcccttttagccggcgacggcatcggtcctgagatcatcgcgcaagccgtcaaggcgctggaccacgtcgcccggaagtatgcgcacaacttcacctaccgcgaagcgctggtgggcgcctgcgccatcgacgccacgggggatccctacccggaggagacgcacaaaatctgccgcgaagccgacgccgtgctgttcggcgccatcggcgaccccaaatacgacaacgaccccaaagcgccggtacgccccgaacaggggctgctgcgcatgcgcaagtcgctgggactgttcgccaacctgcgccccatcgcgctcttcgacacgctggccgaccgctcgccgctcaaggccgaggtggtgcggggcaccgacttcgtctgcgtccgcgaactgacgggcggcatctatttcggacggccgcagggccgcgacgaagggggcgaccgggccgtggacacctgcacctactcgcggcaggagatcgagcgcgtgctgcacgtggcgttccggctggccatgagccgccgccgtcacctgacggtagtcgacaaggccaacgtcctcgaaacctcgcgcttctggcgcgagatcgcccagcagctcgcaccccaataccccgaagtggagctggacttcatgttcgtggacaacgccgcgatgcagatcatccgccagccgacccatttcgacgtgatcgtcaccgaaaacatgttcggcgacatcctcaccgacgaagccagcgtcatcagcgggtcgctgggcatgcttccgtcggccagcgtggggtccgaagtcgcgcttttcgagccgatccacggctcctatccgcaggccgcaggcaaaaacatcgccaacccgatggctgcgatcctctcggccgccatgctgctcgaacatctggggctgaccgccgaagggagcgccgtccgcgacgccgtaaaccgggcgctcaccgaagggatcgtcaccgaagacctcgccgcacagggcgaacggcgctattcgacctccgaggtcggggatttcatcgctgcgcatatttagccgggaaccccgcacgcaaaaggagagtcacgcacacaaaaagggaattccgcacgcaacccggaaatcccgcacaaaaaaagggctgcaaccgccgcgttgcaaccctttttcaattccattcttcccgccgtttcggggccgggagtcggctcggctccaaaccggcccggccgtaaccggacatcgccagtccctgccgcgcagttccggaacacggtctcgctgcagcggacagttccggaaagggacggattccgccatcgcgccgcccgctatccgcctgccgtagaaccgtcaccggcaaatcaccggcatgtcattcgcccgtcatcggcaccgaaacaccagcggggaccgccgcgaatctcacactccggcgacgtactcctccagcgccccaagatccaccgccatcggctccgaaacccgcggacgcttcaccagctccgcaaggcgcggaggcaacggcaccttcgccccggtcacgggcgaaatgacctcgccgaacttggccggatgggccgtcgaaaggtaaaaccccggcctgccgcaggccacggaagccgcatagcccacggcgctgtgcggatcggacagataaccgtaattccggtacagcccgtcgatcgtacggcggatcatggcgtcgtcgcaccggaaccccagcaattcgccgcgcagggcgtccgcatcgccgccgcacagccacatcatccgctcgaagttgctcggcgctccgacgtccatcgcattggccagcgtccgcaccgacggccgcggacggtaatcgcccgtccgcaggaattcaggcaccacgtcgttggcgttcgacgccgcgacgaatccgccgaggggcagccccatgcggcgcgccagcatgccggccgagaggttgccgtagttgccgctcggcaccacgaccaccggactttcgccgcccgccgcctgccgccaccggaaatacccgtagaagtaatagaacgcctgcggaatccaccgcagcaggttgatcgaattggccgacgatacgcggtgtgcggccctgaaagagctgtcggcgaacagctccttgaccagccgctggcagtcgtcgaaggttccgcccacgcgcagcggatggatattgcctccgagcgcggtcatctgacactcctgcaggcggctgatcttcccttcgggatagagcagcaccacctcgacgcccggcacgttgtagaaaccgtgcgccacggcgctgcccgtatcgcccgacgtcgccgtcaggatcaccagcttttcatccgcgccgcccagcaggccgaccatgcggcccatgaatccggcgccgaagtccttgaacgcgaacgtcgggccgtggaacagctccagcgtatagcggctgccgaccggacgcaggggaacctgaaaatcgtagatgcggccgatctcgcgctgcaaaatcccggcgtcgatatcctcgccgaagaacagtgcggccagataccccgccaatgcggcataggattccccggccagccgctccgcgaccgccatatcagcctgcggaatacgttcggggacgaacagtcccccgtcgggcgccagccccgcctcgacggcttcgcgcagagaacagggccgtgcatgtgctttgtctctcgtgctgtagtatttcatggttttcgtcttttcttagtcttcgattcgcgccccgcagttcgacacgcggcccgcatagatgttgcagccgattcccagcccggcgaagtggctcttcatccgctcggcgacccgttccgacaccgacccttcggcggccagcgcaaagaccgaaggtcccgatccggcgatgttcatggccagagcaccttcggagagcaccccctccttcaaacggtcgtaaccgggaatgaaccccttgcggtaaggctccgcgacgacgtcgtgcatcgagcggccgatcagcgccacgtcgcccagcgccagtccggcgacaagtccgccgacgttgccccactgcgtgacggcatgcgccatcggaatctcgcggggcagcacctcacgcgcctctttggtgccgaccacaatgtcgggatgcgccacggcgtagaaaaagtcgtcgggcaccggcaggcggatgatgtccagcggcccgtatccgcggatcagcaccacgccgcccagcaaggccggcccgacgttgtcggcatggggcgtgccgccgatcagcgcttcgcccatcatggcgaactccaccagccgttccgccgcaaaggggcggcccagcagttcgttcagcccgtagacggcggcggccgacgaggcggcgctcgatccgatgccgcttccgggagctatcttttcgagaatcgtaacctcgacccgcacgggcttcccgtacgcttcgagcatggctgcgacggccggggttatgacgttgtcttcgggattttcggggagtctcttcccgctctcgttgcggatcgcaagcccgctcgcacccgcttcggcggcgacctcgatccggtcgcccacgccgtcgagcgccaggcccatgatgtcgaaaccgcagcccagattcgccaccgttccgggggcgaaaaccttgatatgtttcatggtaaatgttctttgagttaaactgcctttgactgaaaatccgggtttccgccccggcagcctcggccgggtgtgcatacggagatgcttctgacggaaaaaacaaactaaacccccccaggggttgtagtagcggcagtcgtgaagataacggagagggcggcatacgtcgtcggagcgcaggcgttcccgcactctccgaacatcgtatgattccgtttcatatccatcagggacaaatataagacaaaaaaatttaacatccaaatcaggtaacgatttgtaagatgctttccaaataatccgcaagggttttacagcgaaatgaatagcacaaaaaggccgcatacacctataataatataaaaaccgtaatatattacaaagacacaggaccacaaatcccgcacaaatcggcctaaaacaggttttaaggccaaaaaccgcggtttcaaattgtaagcaaatgaggaatacgacctgaaaacagcaaccacagagaacgatctgcttccggaatatcacattattaaatttctttaggaatttatttgtacgtctgattttatatacttatctttgaaacggaacaaacacagaaatccggccatgaccgctctgaatcattcgaacaataacgtcattaatctgctgctcgtcgtcactacaggataacgggagaaaggtgatgcgtatattcgaaagattataaaaaagcctttctccgacggagaaaggcttttttgacatccggccccgccgccggaagcggacatgccgaaaaacgagagaagatgaaacacacactcagaagcgccgtcacgacgacgggccgccgcatggccggcgccagaagcctctggcgcgccaacggcatgcgcgaagaacagttcgggcggccggtcgtcggcatcgccaattcgttcacccagctggtgccgggacacgtccacctgcacgaaatcgggcagtatgtcaagcagcgcatcgaagcctgcggatgtttcgccgcggaattcaacaccatcgccgtagacgacggcatcgccatgggccacgacggcatgctctactcgctgccctcgcgcgagatcatcgccgacagcgtcgaatacatggccaacgcccacaaggtcgatgcgctggtctgcatctcgaactgcgacaaaatcacccccggaatgctgatggccgccatgcggctcaacatcccgacggtcttcgtgtcgggagggccgatggaggcgggcaaattcgacgggagggacatcgacctgatcgacgcgatggtcatggcggccgacgaagcctgcagcgacgagcagatcgcgcgcgtcgaacgctgcgcctgccccggctgcggctcgtgttcgggcatgttcacggccaattcgatgaactgcctgaccgaagcgctgggactctcgctgccgggcaacggcacgatcgtcgccacgcacgccaaccgacgccggctgttcgaagacgccgcggcgctgatcgtccgcaacgccgaacgctactattttctgggcgacgaatcggtgctcccgcgttcggtcgcgaccaaagcctccttcgagaacgccatgtcgctcgacatcgccatgggcggctcgaccaacacggtgctccacctgctggccgtggcccgcgaagccggcgtggatttcacgatgcaggacatcgaccgcctttcgcgtcgggttccggtgctctgcaaggtggctcccaactcgcagtatcacatacaggacgtcaaccgcgcaggcggcatcctctccattctgggcgaactggcgcgcgccggcctgctcgacacctcggtcccgcgcatcgacgggcggacgctccgcgaagcgatcgacgcctgcgacctgcgcagcgagacgctgaccgacgcggccctgcgccgctggctgagcgcccctgcggggctttacagccgcgaactgggggcgcagcactcctattacgacgcccccgacgcaaaccgcacgacgggctgtatccgcgacgtcgaacacgcctactcccgcgacgggggactggccgtgctgacgggcaacatcgcccgcaacggctgcatcgtcaagacggcgggcgtcgatgagtcgctgcacgttttccgcggccgcgcacgggtctacgaatcgcaggaacaggctatcgagggcattctcggcgacgaagtgcaggcgggcgaggcggtcgtcatccgctacgaaggccccaagggaggtcccggcatgcaggagatgctctaccccacgtcgtacctcaaatccaagcacctcgacaaagcctgcgcgctgattaccgacggccgcttttcgggcggcacgtcggggctgtcgatcggccacgtctcgcccgaagccgcgtccgggggcgaaatcgccgtcgtccggacgggcgatgaaatcgagatcgacatcccgcagcgctcgatacgcctgctggcagacgacgccgaaatcgccgcgcggatggccgctcaggagtattttcgccccgccgcacgcgaccgcaaagtccccgcgtcgctgcgcgcctacgccaagctggtcagctcggccgacaagggcgccgtacgcatcgtcgatgaagaataagtaaaacagcagcaatcatggatacgacgcaaacaaacatgtccgaaccgcagcccggtccctccgtcacgggagcgcaggccctgatcgaatcgttcctgcgcgagggcgtcgatacgattttcggctaccccggcggggcgatcatccccgtctacgacgcactctacgactaccgcgaccgcctgcgccacatcctcgtgcggcacgaacagggcgccgtacacgccgcgcagggctacgcccgcgtcagcggccgcgtgggggtctgtctggtcacctccggccccggcgccaccaataccgtgacgggactcgccgacgcgctgatggactccacgccgctggtgctcgtaaccggacaggtcggttcgtcgctgctgggcaccgacgcctttcaggagaccaatttcgtgggcatcacgcaggccgtcaccaaatggaactgtcaggtcaagcgcaccgaagagattccgggcgccatcgccaaggcgttctacatcgcccgttcgggccgccccggccccgtggtcgtggacatcaccaaggacgcccagtgcggaacggccccgttcagctacgagaaagtggcttcgatccgcagctatgtccccgcatcggttccctccgaagagcgcatcgccgaagcggcaaggctgatcgacgccacacagcggccgctggtcatggtcgggcagggcgtgatcctgagcggcggcgaagcggagctgcgcgccttcctcgacaagagcggcatgcccgccgcatcgaccctgctggggctttcggccctgccgaccgactcgccgcagtacgtcggcatgctgggcatgcacggcaactacggtcccaacatcaaaaaccgggactgcgacctgctcctcgccgtgggcatgcgcttcgacgaccgcgtgacgggcaatccgggctgtttcggggcgaacgccaagatcatccacctcgaaatcgatcccgccgagatcggcaagatcgtcccggccgacgttgcgctggtcggcgacgtgaaacagacccttccgctgctcaccgggcgcatacaagcccgcagccaccgggcatggatcgacgaattccgcgcctgcgacaagatcgaatacgagaaggtgatccgccgggcggtccatcccgccgaaggccgtatccgcatgggcgaagcggtcgccgccgtggcccgcgcctacgacaacgacgcggtgctggtgaccgacgtgggtcagcagcagatgttcgcggcccgttatttcgggttccgccgcagccggagcatggtgacttcgggcgggctgggaacgatgggtttcgggcttcccgcggccatcggggccaagctgggcgcccccgaccgcgaagtgtgccttttcgtgggcgacggcggtctgcagatgaccattcaggagctgggcacgatcttccagtcgcaggtggccgtgaagatcgtcctgctgaacaactcgtttctgggcatggtccgccagtggcaggagcttttctacgaccgccgctattcgttcaccgagctgaaaaaccccgatttcgggctgatcgcccgcggcaacggcatcgcctaccgctgcgtcgagcggcgcggggagctttccgacgccatcgccgagatgcaggcctgccggggcgcatacctgctcgaagtgcgcgtcgagggcgaagacaacgtatttcccatggtgccggccggcgcgcccgtcgcagcgatccggctggagtaaaacccgaacgagaatggaagaacaagagtatatcatcaccgtattttcggaaaacaaggtgggtctgctgaaccagatcaccacggttttcaccagccgcgacgtcaatatcgagagcctcacgacctccgagtcggcgctggcgggcatccataagttcacgatcgtcgtccgcaccggaccggaccgggtcgaaaagctggtgcggcagatcgaaaagaagatcgacgtgctgaagactttcgtctacacctccgacgaagtggtgcagcaggagatcgccctctacaaggtgacgcgcagccgcagcgtcgagcgcctcgtgcgccagcacaacgtccgtatcctcgaaatcgacgacgactacatcgtggtcgagaagacgggccacaaggccgagaccaaggagctgttctgcctgctgcagccctacggcgtgcagcagttcgtgcgcagcggcatcgtagccatcatcaaatcgcggcgcgaactgctcaacgagtacctcgaagagctggaacgcagccgacggcagacgaattcaaatcacttttaaatcatactaattatggcaaagatcaatttcggcggagtcgaagaaaatgttgttacgcgcgaggagttccccttggagaaggcccgcgaagtcctgaaaaacgaaaccatcgccgtcatcggctacggcgtgcagggtccggggcagtcgctcaacctcagggacaacggcctgaacgtcatcgtcggccagcgcgagggcagcaagagctgggagaaggccgtcgccgacggctgggagccgggcaagacgctcttcggcatcgaagaggccgccgagcgcgcgacgatcatccagtacctgctgtccgacgcgggtcagatcgccgtatggcccaccatcgaaaaacacctcacgccgggcaaggcgctctacttctcgcacggcttcggcatcacctacaaggaacgcacgggtatcgtgcccccggccgacgtggacgtgatcctgatcgcccccaaaggttcgggcacctcgctgcggcgcatgttcctgcagggccggggactcaattcgagctatgcggtcttccaagacgccacgggccgcgccttcgagcgcgtggtggcgctgggcatcggcgtaggttcgggctacctgttcgaaaccgacttcaaacgcgaggtctactccgacctgacgggcgagcgcggcacgctgatgggcgccattcagggcattttcgccgcccagtacgagacgcttcgcgccaacggccacaccccctcggaagccttcaacgagacggtcgaggagctgacgcagtcgctcatgccgctggtcgccgagaacggcatggactggatgtacgccaactgctcgaccacggcccagcgcggcgcgctggattggtggaaacgtttccgcgacgccacgaaacccgtcttcgaggagctttaccgcgaagtcgccgccggcaacgaggcccagcgttcgatcgacctcaacagcaagcccgactaccgcgagaagctcgacgaagagctgcgccagatgcgtgagagcgagatgtggcagaccggcgccgtggtgcgcaagctgcgccccgaaaacaactgacgcaatgcgggcgacgccggggaggtgcggcacaaagtacgtccccggcatcggcccgcccgccggcggcgcacgcccggcttatcctattgacaaaccccggaaccgcctattccaagggagggttccatgacaacaaacgaacagaaaatgtgtggattcgtaggactgtttgacatccggcagaaatcggatgcgctgcgcacgcaggtgctgaaaatgtcgaaaaatatccgccaccggggacccgactggtcgggcgtctactgcggcgaacgggcgattctctcccacgagcggctttcgatcgtcgatccccagtcgggcggacagccccttttcagccgcgacgggaaactggtgctggctgtcaacggcgagatatacaaccatcgggaaatccgcgacgagctggccggggagtacgatttccggacaggctcggactgcgaggtgatcctgccactttaccaaaaaatgggcgtcggactgctcgaaaagatcagcggcatcttcgctttcgcgctgtacgacatcgaaaacgacgaatacctgatcgcccgcgatccgatcggcgtcatcccgctctacatcggctgggaccgcgacgggcagttctacgtggcctcggagctgaaagccctcgaaggggtctgcaccacgatccagcccttcctgccgggccactactggtcgagcaaagagggaaaaatggtccgctggtacgaccgcgactggttcgaatacgacgccgtgaaagagaccggcgccgacattccggccctgcgcgccgccctcgaagcggccgtcaagcggcagctgatgtccgacgtgccctacggcgtgctgctgtcgggaggtctcgactcgtcgatcatctcggccgtggcgcggaaattcgccgaccggcgcgtcgaatcgcacgaccgcgaccgggcgtggtggccccggctccactccttcgccatcggactcgaaggctcccccgacctcgcggcggcccgcaaggtggccgaccggatcggcactgtgcaccacgaaatccactatactattcaggagggtctggacgccttgcgcgacgtgatctacttcatcgagacgtacgacgtgaccaccgtgcgggcgtctacgccgatgtacctgctggcgcgcgtcatcaaatccatgggcatcaagatggtgctttcgggcgagggcgccgacgaagtcttcggcggctatctctatttccacaaggccccgaacgcccgcgcattccacgaggagaccgtgcgcaaggtcggcaagctccacctctacgactgcctgcgggccaacaaatcgctctccgcatggggcgtcgagggacgcgtgccgttcctcgacaaggagtttctggacgtggccatgcgcatcgatcccgaagcgaaaatggctaaggacgggcgtatcgagaagtggattctgcgcaaggctttcgaggatctgcttcccgaagagatcgtctggcggcagaaggagcagttctccgacggcgtgggctacggctggatcgacaccctgaaacgaatcacctccgaagcggtctccgaccgcgaaatggaacacgccgccgagcggttcccgatcaatccgccccgcaacaaggaggagtactattaccgcacgatcttcgaagagcacttcccgtcgcagaccgcggcccagtgcgttccttcggtgccctccgtggcgtgcagcaccgccgaggcgctggcttgggacgcggcgttccgcgacaggaacgacccgtcgggccgcgccgtgctgggcgtccacaacaccgacctgacgcacggttagcaccgcatacgcttaaaacacttcaccgaccgaaccttccgaaaacttcagcatgttttaagcagagggaggccccggaatccggggcctccctaaatttatccgaaagcacgcttgcgaagcactcccggcagctttcgccgccgaaacgcagcgccgcggtccggcatgccggaggcggttattcgatgccgcggatatgcttctcccatttccacgccgcagccagcgtctggtcgagcgaacgttcggccttccaacccagttcgtcgttggcatacgacggatcggcccagatcgccacgatgtcgcccgcacggcggcccacgatcttgtagttgagtttcaggttgttcacctcttcgaacttacgcaccagttcgagcaccgaaacgccgcgtcccgtgccgatgttgaagatttcgtacttctccctgttcttgccctcgatcatgcgcgcgatcgccgtcacatgggctttggcgaggtccaccacgtcgatatagtcgcggatgttcgagccgtcgggcgtcggatagtcgtcgccgaagaccgaaaggcattcgcggagtccggcggccgtctgcgtgatgtaggggaccagattctgcggcacgccgcgcggcagttcgccgatcagggccgaaggatgcgcgccgatggggttgaaatagcgcagggcgatgcccttcatgccctcgtaggccgccagcgaatcgcgcaggatgtcctcgcacatctgcttggtgttgccgtagggcgaggtcgcaggcttgcggggcgtctgctccgtcacgggcagcttgtcggcctcgccgtaaaccgtacacgacgacgagaagacgatgttgtgacgtccgaactcacgcatgaggtcgatgacgttcataaacgaaacgaggttgttgcggtagtattccagcggcttgccgaccgactcgcccacggccttcgacgccgcgaaatgaatcaccgagtcgaagtcgtacttttcgaacactttgcgaaaagcgtcgcggtcgcagcagtccgccttttcgaacggcacttcgacgcccgtgatcctgcggactccctcgacggcgtccatgtcgctgttcgagagattatcgacgatcaccacgtcgtaaccggcgcctatcagttccacggcggtatgcgaaccgatataaccggcgccgccgctgactaaaacacacgattttttcataagttgaggtttttatttgagtcacaaatataacaagaaaaagcggttatccctcaaaaccgcccgaaatcctgaacctccggcgcgaaaaaacccgctccgggacttctcgccgaagtccggagcgggccgtataaatccggaaggggtcccgaaagccgccggaaaaatttgccggacgccgcccaaatgtgtgccggacaccgccccaatgcgcgccgaccgccggaaaaatttgccgggtcagaatttttcgcccagctcgcgcggcaggtagaacgtgtcgttgcggtcgatatagaccactgccgagcgcagtttcaggggcttgccgtcgaggtaggcgaccgaaccgtaggccggtacgcgtagcgtacggcgccccttgcgaaccgtcaggcagggcatctgcccttcggccgccgaaatcgagcacttcgcgccgcggaacacctcggtatgcggtgcgaacagttcgccggtcaattcagccaacggacgctccaaaccgagcaggtcggccatgtaggcatgaatctccgtattggtattgcgccccacgggcaggtcgccctccgggtggtaagccgccagaaagacgtcttcggcggtatggctgccgctgaggaacccgaaatgggtgcgggaggtcacgatgcgggcaatgctcgataccatgttcacgctgttggcgaccttcatgtagtcggcctcggtatagttgcgcgaactccggagcagggccacttcatcgtccgtaagctcgatgcccgtgtattcgcggaacaggggccggatctgttccggccgcgccttgagcagtattttttcgagtcccgaagccgtgcggcgcaccttcgagatattcatataggccgaatcgagtcccttggaggcgtaatccttataggccccgtcgccgaaactcagccccgaagtgccgtggtcgggcatgatgacaacggccgtccgcccgtcgcggcgggcgaaatcgagcgccacgcccacggccttgtcgaaggccagcatctcggtaatcacccccacggggtccttggcatgcgccgccatatcgacgcggctgccctcaaccatcaggaaaaagccgttttcatgcctgtccagcacctccagcgccttggccgtcatctcggccagcgacggctgttcggcatcgttccggtcgaggtcgtaactcatgttcccctgcgcgaagagcgaccacacggggcctttgccgtcgtaggcgcggaacgccgcggcatcctgctcgataagcgtcgcgccgctgccgcgcaaatacgcccgcatggcgtccgagacctgcttccggccgccgccgaacatcacgtccaagtcgttgcccgccatctgcgccgccagcgcggaataggcgtggcgggagtagtggtgcgaagcgcaggcggcgggcgtcgcatggcagaaatcgaccgtcacgacgagtcccgcagcctttccccggtcgtgcttggccgcttcgagcagcgtcgccagcggctgacaggcccgtccggattcgacctcgacgatatcctgcgcgggattggccgccggatagaccgaaacgttgcccgcctgctggggcatgcccgtcatgtaggccgacatggccggggccgagcagggaatcggcgaatcggacgagaagctcccgaccagcccgcaaaggcaggaatcgaggttgagcgtccgctgcgaagggtcgttgtagaatttataccagcgcgccgcggcgaggacgctcgtggaggtcccgtcgggaatcatcacgatgacgttgcgcaccggggcgacgggtttgcggtagaagggctgcgccccggccgccggcgcggcgaagagcagaagcagcagaattgcactttttttcatcattgtatatttgtaattagttaattaaatttgaatagttaagacatcagagtatggaataagtccgatctctcattggttttctaaaccgggaattatgttctgaccccatactctttacatcagaatccggatagttcgtaaggtgtctgagcccgtattcgcaatgaaggaccaagatgtaagcgatgtcgttaaaaccaaaaaatgaacggccatgaggtacattggaatcgacgtgagcaaggctacattcgtggtagcttactcctccgacaaaggcggggagatccgtacttttaacaacacgaccgctggtatcagacagtttatcgggactctccccaaagacggcagtatccactgtgttatggaggcgacagggaattacagcgccttgctgctgtatatgctcaatgtcgccggaattactgtcagcatggagaatccgctgaaggtaaagaacttcgccaaagccttgctctctacggtcaagaccgataagagcgatgcacgactcattaccttgtacggagagaagatgaacccgcgtcctttcaaggtacagggagaggccatcctgcggctccgacagaaaagaaccgtcattcgccaacttactaagcagattaccgccatgtcgaaccttcgtggctctcttgcatgtctgcctgtcccggacaaaggtgcaactcataccgtagacgaaactatcaagttccttgaaaagaagcgtgacaggctccaggcggaactcacggatcttgtcgaagtggagttcagccgacaactcgcgctgctgacgaccatcaaagggataggcataacgcttgccacggcgctcatcatcactactggaggctttacctacttccaaaatgccaagcaggtgtcccggtatctcggaatttgtcccacttacgaacagtccggaacttcggtaaacatcaaagggcatatcaaccgaaacggagacgcatacactagaggacttctctatatcgccgcttggcctgccagtaggttcaatgcccaatgcaaagagacctatacgaggctcaggcaaaacggaaaatcgggaaaactcgctatgatcgctgtcgcaaacaagctcatcaggcaggcttttgctgttgtcgcgcacgataaagagtatatcgacggattcgtctccaacagaccttagtaggaaccattctccgatattattactctttttccgcattttttaatatagttcgtaattcattgcggttttacgggcgttgaccggacggcgaacgacggcgaaggtgtctcgcatcattggaatcggcctgtcgggcaaaaacggtagtaaaggtacgaaaaaacaagagaacgggaaagaatacgaaaaaaataagcaaatccggacccgaaaatcgccgggagtacgggagatccgccgcacaaaaaaacctcggccccgccgcacggaaggagtgaactgaggggctgcgcaggcccggcggaggccgcaagacgaagcggactaacaattcgtaaccccaatcgtgaaaaagagcgcggaagaatgtctgttttcagaaattaatcgtatatttgctaacagattgacacctcccgcaccggaaattcatcaaaccataaacggatatgtacggaaaaatcaaagaacatctgcagcaggaacttgccgaaatcaaggctgcagggctctacaagagcgaacgggtcatcgaatcgccgcagcgcgcggagatcgaagttgcaggtcgtaaggtacttaatttctgcgccaacaactacctcggactttcggacaacccgcggctgatcgaagccgcgaaacgggccatggacaaccgcggctacggcatgtcgtcggtgcgtttcatctgcggctgtcaggacatccacaaacagctcgaaaaagccatagccgactacttcggcaccgaggacacgatcctctacgccgcctgcttcgacgccaacggaggcgtcttcgaaccgattttcggtcaggaggacgccattatctccgactcgctgaaccatgcgtcgatcatcgacggcgtgcgtttgtgcaaggccgtgcgctaccgctacgccaacgccgacatggccgagctggaggagtgtctcaagcaagcgcaggcgcagcgtttccgcatcatctgcacagatggggtcttctcgatggacggcaatgccgcgccgctggacaagatctgcgcgctggccgagaaatacgacgcgctggtgatggtggacgagtgccactcggcgggcgtgctgggcaaaaccggccgcggcatcaccgaactctacgacctgcgcggtcaggtggacatcctcaccggcacgctcggcaaagccttcggcggcgccgtaggcggcttcacgacgggccgcagggagattatcgagatgctccgccagcgttcgcgcccctacctcttctccaactcgctgccccctgccgtcgtcggcgccggaatcgaaatgttccgcatgctgggcgaaagcaacgaactgcacgaccgtctggtggccaacgtggagcacttccgcgaaggcatgatggccgcaggtttcgacatcaaacccacgcagtcggccatctgcgccgtgatgctctacgacgccaagctgtcgcaggacttcgccgcccggttgcaggacgaaggggttttcgtgacgggcttctactatccggtcgtgccgaagggtcaggcccgcatccgcgtgcaggtctccgcaggccacacgaccgaacagctcgaccgctgcatcgccgccttcatcaaggtcggcaaagaattgaatgtcatcaaataaaaccctcaagcctatgccgaaaacatccttagacgcgattgaccgcaaaatcctcaaatacctgatcaagaacgcccgcatgccctttcttgagatcgcccgcgaatgcggcatctcaggcgccgcgatccatcagcgcatccgcaaactcgacgattcgggcgtgattctgggcagccggctgatcgtcgatcccaaaatgatgggcttcgacgtctgcgcccacatcagcatcacgctcaaggacccgcagctgctcaagcaaaccgtggaacagctcaaggagattcccgaaatcgtggaggcgcacttcatcaccggttcgggcaatatcctcgtgaagctctactgcgtggacaacgagcacctcatgcgcacgattttcgacggcatcctgcgcattcagggcgtctcctcgaccgagacccagatctcgctgcaggaagcgttccagcggcaggtgaacatcgattttatcgaggaatagcatccggcggagaatcatccgctctccccgcacgacggagacccgatcgggtctccgttttttcgtgcctgcgagggaaagggtgcaacccgattcgttatcatatcccggaaaaacccgccgggccctgattttccgtacctgccgggcgccagaaccgacatcctgcaatataccccgaaaaccgcccgcccccggccaaacgccgaacctgccggcacaaaaggaaagcgccccgcctgaaaacaggcggggcaccccggcaaacaattgtttaactgatgattatcccggaagcctattcggcggacgaagccggtgcttccgatgcggaggaggagttaccctcacttgacccttcactctcaaccttactctcctcctttgcggattctccggcagtcgaatccgtcttttccgcatcgtcagccgccgatttctcctgcgtgtcggcagccggagccgcagcttcggtcgcctctctcttttcgggctgctgggcgcaagccatcgctccgccagccatcagcagcaaagctgccatcgttacaattgtctttttcatcgcttttaaaattaaaaggttccttttcacttcttcggttcggatatgtctcgccaaccgttctgataaaatggagttcaagcggcgtgccatccggataaaaaacggcaaaccgctgatagacagcggtcggcaaggcacgccggaatcgtccggagtgtggaaaggtgtggaatcgcgctacaaagtgtggaaataatccacacccggcggctattcgatgccgtaaagatgcaacttgttgtagagggtcttgcggtcgatgccgagcagtttggctgcctgcgacttgttgcccccggccatcgccagcgcgcgccggatctgctcctcctcgccggccggattgcgcagcggcaccgcaggagtttcgggggcctcggacaactcggcgggcagttcgcggcaggtgatgtaatcccctgtgcagagcagcgtcgcggacatcaccgcgttcttcatctgccgcaggtttccgggccagtcgtagcgggtcatggccgcggcggcctgcgggtcgaagcccacgatccgcttgtccagctcccggttcgccgcatcgagaaagaagtcggcgaaaagcatgatgtccccgcgcatctgccgcagttcgggcatgcggagcgtgaattcgttgatgcggtgatagagatcggcgcggaacgcaccgcgcgcgatggcggcttcgaggtcctcgttcgtcgcggcgatcagccggatatcgaccggaatttcgcggctgccgcccacgggacgaatgcgccgctcctgcagggcgcggagcagctgcacctgcgtttcatagctcaggttgccgacctcgtccagaaagagcgtgccgccgttcgcggcttcgaaggcgcccgtcttgtcgcccacggctcccgtaaacgaacccttgacgtggccgaaaaactccgaggcggccagttcgcgcggaacggcgccgcagtccacggccacgaaaggcttcccggcacgcctgctttcgcggtgaatcagctgggccacatgctccttgcccgtgccgctggcgccggtcaccagcaccgacatgttggtcggcgcaacgagccggacatattcgtaaagccgctgcgcggcatcgctgcggccctcgatgtaattgggacgctcctcccgcggtttcttcgccgaagcggcgggaacgggaggcttctcactgccggcagccgggacgtcgagcgcttcgcggatctttttcagcagttcgtcgggattgaccggcttggccacgtaatcccgcgcgcccagcttcatgcagcgcacggcgttctgtatctcggcgtagctcgtcatcacgatcaccggaatctccatatgctgcccggacatccactgcagcagggcgatgccgtcctcgtcgggcaggcgcatatcgctcagcacgagcgagaatccgccctccgcgagcgccgtacgggccgccgcgacgctcgccgccgtctcggtttggaagccctttttcgagagccacgtcttgagcatcagggcgaaggtgatatcgtcgtctatgattaaaatccgttccatactcagggcaaagatacctttttttgcgcttccgcgacaatcgcgcggatattttccgccgccgcgccgatctcgccgcgcagggcgtcggtcagcggaccttcccagctttcggccgtgcgcagcgtcgcggcaatgccggccgcccccagcatcgtgaagatcggcagcatcttgtgcgccacggctttcagcgcggcaatgtcgccgctgccgagcgcctcttcgagcaaccggcaattcgcggcgctctgttcggcgaaggattccagaatcccgcgcgccgcttccgcatcgtcgcccgcataggccgtcagggggccgaaattcacaccgccctccgaaacctccggcgcattgtccgccgcaccgtccgctcccctcttgccgacatgcctccccgcactgacgggttctcccgcgccgacgacaattcccgcagcgccgctcttctccgcgccttccgcatcctctgcgcttcgggcctttcccgcgccgcaaacggcgtccagcacggcaatcagctcgttagccgtaaagggcttgcgcaggcatcccgcaaagccgcggtccgagaaatccccggcttccaactccccgcgtgccgaaaccgccaccacgggaagcgcggaattcacgccgcgcaccgccgcaaggacgctgaaaccgtcggccgacggcatctgtatatcggtcagcaccacgtcgaagccgccgtccgcgaccagtttcgcggcatattcggggtactgacagcactcggctccgacacccgcctgacggcacatcgcggcggtcatttcgagctgcagaggatcgtcgtcgatcagcagcgccttcacgccgccacgcaccgccggcacgcacgcttccgcaggccgcagtttgcggccctctccgcccgaaacgggtcccaccgggatcgaaacgatgaatttgctcccttcgcccaaacggctttcgagcgatatggtccccttcagcagtttcacgagccgatcgacgatcgacagccccagtccgaatccatcgacgccctgcgccgagcgcagacgcacgaattcctgaaaaatccgctccttctcttcgcgtccgatgccgcgtcccgtatcgcggaccgagaagacgagccggccctgcaccacatcgacacggatcgtcaccgagccttcgtcagtaaatttcagcgcgttggagatcaggttgtcggcgatctgccggatacggaacggatcgcccgccacctcgcgcccggccgccggttcgacgtcgagcgtcagcccgatgcccttcgccccggcctgcgccgcaaatccggcgcggatcgtttcgaacagctgcgccgggcagaacgcgaccttatcgacgtccaccttgttgatatcgaggcggtagaagtccagcaggctgttcaccagcgccagcagatgttccgacgactccttcatgttatgcaggtacagctcctcgcgcttgtcgccggtcaggcgcgaaagcaggtcgatatagcccatcaccgaacccagcggcgccttgatgtcgtgcgtgatggccagcatcagcttctcgcgcgccgccagcagcgcttcgttgtcgcggttggcccgctccagcgcccgccggtagcggttgctgcggttgatgtcgcgccacaggatgccgacgaacagcagcatgagcaccacggccgcgacggcgatcacgcccagcgtcagcgacgaacggcggcggatggcctccgtctgctcgaagcggttcatcagaaaagccgtatcctcggcttcgaaatccatgataaggcggtatatcttcgtgttcaccagctcgttgctgtaccgcaggcgcatcccttcgttccacgcccggtcgtagatgccgatgcggtcgctggtcacccggtcctgcagcgtccgcagcaccaccgcgatcgtatccttcacctccggcgcaggcagcgaatccacgacccgttcgtgacgggaaatgatcatcccggcctcctccttcggcgggctgaacaggtcggcgaagcggcggaagaacttgcgcttgcgccgcgggacggtcaccgtatcctgcacgaccacgcgcgaagcgacggtgtccgccgcccgtacgacgacgctgtccccgcgcgccgcgctgtccgccggaccgatcagctcgcggatattcttgtccagcaggctggacgtggcggccgaacggatcgtccgccgcaggctcatcgtccgccgctccttgtcggccagaagacgcacgatgctgtccagacgcatcgtctgcagcgaatcctccgcagcggtcagcccccgcagcgagtcgatcaggccgcgcacggtgcgcagctcgcgtttgtaacgggactcgtaggactggtatccggcgatcatcagctgaccgtaactctcggcctgataaagatggtagagcgtctgtcccgcgacgctgcgtttggtatggagcagggaatagctgccgtcgggagtcgaaaaacgcaccaccgtccggtagacatagcctaccgaaaggacgcagaccgcgatcaggatcgcatatcccgcgaaaatcttggttttgacgaatttcgactctttcatgccttcaaagacaaaggatgcggagcgacattcggcggaaatctacgtttgcacactccccgatcgccggaccctttcggacaaagatacgaaaaacccgcgaatccggaatctctttcgttcccggatcgcaaatccgtcccgccccgaaaacaagccgggccgtacgacgtcgtacggcccggtattttcagcgatcgcggtacggactagtacttgtaccgaatccacttgtaaagctccttgaacgtcggctttttgccgtacatgaagattcccacgcggtagatcttggccgccagccacaccatcgcggtaaacgaggcgtaaaggatcgccagcgaaaggatcacctcccagaggggaatgccgtacggaatacgcgccatcatcaccacgggcgaggtgaaggggatcatcgagaaccagaaagccatctgcgaattggggtcgttgatgacggttatcatcaccagcagggcgaggatgatcggaatggtgatcggcgtctgcaactgctgggcgtcctgaatgctgtccacggccgaacccacggcggcgaacatcgccgagtagaagaggtatccgccgaagacgaacagcagcaggtaggcgaagatgcggaggatatagccgaaatcggtcacggcggccatcacctgcagcatctccggattcatgtctatcgacgccgcggcgtcgggaaccccttgctgcatggcctgcaccccggccagcacgtcggccggcatcatgtgtaccgccacggccgcgccgacggcgcagagcacgccccagatcagcacctgcaccacggccaccgaagccacgccgagtatcttgcccagcatcaggtcgaagggccgcaccgacgacaccatcacctccagcacgcggctgttcttctcctcgatgaccgactgcatgaccatcgacccgtaaatgagcaggaacatgtagaggatcatgcccagcacgaacccgacgccggtggcgatgaccgacgacttggcctgcgactcctcctcctgcgactcgtcgttgcggaaggtctgcatgccgaccgtggtcttcacctcctgcagaatctgcgagaggttctcgatattgtacgacttgagtttttcggcctcgatgatctcttcgagctgccccgtgatattgctctcgaccgtcagcgacgacgacgaattgacgtaaagcttcacgttgttggggttggtgaggatgtccgagccgatatagagcacgccgaacttgtcggtcagctccttacgggccgcttcggtcgagaggtccgtagtctggaagaccagctcttcgccgctctgcagcttcggagcgaccagcccgctttcgtcgatgacggcgatctgcttctcgtcgccgcgcgaatacttcatgatgagcatcggggcgaacatcaggccgatcatcagcaggggcatgagcagcgtggtgatgatgaaggattttttgcggacgcgctcgttgaattcgcgccctatgataatgctgacttgtgacatgatcgtatcgttttaaaggtttccgtttacggcgcggatgaaaatatcgttcatcgagggaatgatctcctgaaacgagcgcagttcgacggcgtcgttcaccgcggcgatcactccgcgcacctcttcgtcgcgctcgacgtgcagtttgagcgaggtgtagaccgcctgcgcctgcgagccttccagaatctcgcaacggccgtcgacggcattgcgcagcgcctgttcgtcgccgcggtagaacacttcgaagatgttgcttccatgacggcggcgaatgtcgtccacacggcccgaaagaatattgcgagacttgtttatcagcgtgatatggtcgcagatctcctcgacggacgacatgttgtgcgtcgagaagatgatcgtcgcccccttgtcgcgcagcgccagtatctcgtccttcagcaggttggcgttgatcgggtcgaaacccgaaaaaggctcgtcgaagatcagcagttcgggttcgtgcagcaccgtgacgatgaactgcactttctgggccatgcccttcgacaactcctcgatcttcttgtcccaccagtcctgaatgccgaacttcacgaaccactgcttgagccgtacgacggcctcgcggcgcgaaaggcccttcagccgggcgaagaagacggcctgttcgccgaccttcatcttcttgtaaagtccgcgctcctcaggcaggtagccgatgcggtaaacatcctcaggcgaaatttcgcggccgccgaacatcacacgaccgctgtcgggcgccgtaatgcggttgatgatgcggatcagggtcgtctttccggcgccgttgggaccgagcaggccgtataccgaacccttggggatggcaagcgatacgtcgtcgagggccttgtgcccggcgtactgcttggtgacatgttctactgtaagtaaatccatagtcgctgcgagttatttttggggtttgttcagcgacaaatataacaacaatttttgaatatcaaaaaatatttatcgtttttcgataattcacatccgccgcatacccgcccgccacaaggcggcggaccggagagaccggccagcccctctgtaaaagaaatccctaaaatccctataaaaaaggcggccgggagtcccggccgccttcgatcgcaggatgtttcatcccgccggacgataccctaccagacgatcacacgctcctgttcgggcatgaacatggccccgtcggtaatgtcgaacgcatcgtagaacgtctgcaggttgcgcagcgtggcgttcacgcgccacttgcccagcgagtgcacgtcgatcttggtgagacgggcgatctcctcgtcgcggatgttctgtgcccacaaggccgcataggccagatagaaacgctggtcggccgtgaagttgtcgatcggcgcaggctccgcgccgttcagcgagttgtggaacgccgtgtacgccacgcgcaggccgccctgatcggcgatgttctcgcccagactgagcgaaccgttggccatgacggcaggctggccctccttggcgggcagcacctcgatcgcatcgaactgtttcacgagaatatcggtcttggccttgaacgcctcggcatccgcctcggtccaccagttgttcatgttgccgtccttgtcgaagttgcggccctgatcgtcgaatccgtgggtcatctcgtggccgatcaccacgccgatggcaccgtaattcaccgcgtcgtcggcgtcggggttgtagaacggcggctggagaatggcggccgggaagcagatctcgttggtcgtggggttgtagtaggcgttcaccgtctggggcgacatgtgccacttctccttatccacgggcttgccgagttccgagatattgtcggccgtataccagcggttggcattgacgatgttctcccaatagctcttcgaggggtcgatctccagcgtcgaatagtccttccacttgtcgggatagccgatcttcaccgtaaaggcggccagcttctcctgcgccttggccttggtggcgtccgacatccagtcgagcgccgcgatgtgctggccgagcgccgtctgcaggttcttcaccagcgtcagcatgcgctccttgtccttggcggggaagtatttggcgacgtacatctcgccgacagcctccgacaacgtgccgttgggcaccgacatcgcgcgcttccagcggggtttcatctcctgctggcccgacatcaccttgccgtagaagtcgaacgacgcctgctggaagtcgtcgctcaggtagggtgccgcagcgtcgatatactgcgccgcgaggtagtagcggatatcctccagcggggcgtttttcagcaggtcgttggcgttggcgacggccgacggcgtggtgacgatgatcgtctcgaagtcgccgatgcccatagccttatagtaggcctcccagtctacggcgtcgtaaatcttctcgaaatcggccttcgccgtggggttgtactgcgcgggaatgttgcgcagctcgacgttcgaccacgacttctcggccagcttcatctcgacgttcatcacgccggcgaccgccttttcgacgtcggcttcgggaatgcccgcaaaacggaatatcctgcccagatactccttgtagcccttgcggatatgctcgttctcaggatcgaggtagtagtcgcggttgcccatcgtcagccccgactgcgagatatagagggcgttgatgtcgctgttcatcagatcggcctgcacgcccacgccgaagaacggattggctaccgtcgtgtggagtttggccacgatgccggtcagctgtccgcggtcctcgacggagaggatctccccgacggcgctcttcagcggcgcggcgccctcggcgttcaggcgcgtagaatcgagacccatcttgtagaggtccgaaatcttctgctcgacgcttcccggtgcggcgctgatcttggtcatctccgagaaaagctcgttgatgcgcttctcgttgttgtcgcgcagcacgtcgaacgagccgtaacgcgaatattcgggcttcagcgggttgttcttctgccatccgcccgtggcgtactggtaaaaatcggcgtcgggagcgaccgaaaggtcgaaattggccatgtcgatagccggcgtcttggatgtattctgacaacttgccatacaagctactgttgctgcaaaaatgaaaatctttttcataggttcgggtttttagtgacgacaggggtgtccgtacttgccggagcacccctgtctgttcgtatctcgttcggaagcccggcttatttgcggatggccgcaacgcccggaagctccttgccctccatgtactccagcagggcgccgccgcccgtcgagacataggaaaccttgtcggccagtccgaacttgttgatgcaggctaccgagtcgccgccgccgatgagcgagtaggcgcccttcgaagtggcttcggcgatcgcttcggccacggcgcgcgaaccggtcgcgaatttgtcgatctcgaacacgcccacaggaccgttccagaggatcgtcttgcacttgagaatctcctcgcggaagaccttcttgccctcgtcggcgatgtccacgccttcccagccgtcgggaatgttgttggccggagcgacgttcgtattggcgtcggccgagaatgcgtcggcgatcagcgcgtcgggcgacatcacgaccttcacgcccttctccttggccttggccagaatgtcgagcgccgtctggaactgatccggctcgcagatcgagttgccgaccttgccgccctccgcagccgcgaaggtataggtcataccgccgcccagcaccagcacgtcgaccttttcgagcagattctcgatgatggtgatcttggtcgaaaccttcgaaccgcccagaatggcgcagaacggacgctccggattgagcatgatgccgtcgatggccttcagctcgttctccatcacgtagccgaacatcttgtcgttggggaaatagtcggcgatcagggccgtcgaggcgtgtgcgcggtgcgccgtgccgaacgcgtcgttgatgtagcagtcggcatacgatgcgagcttcttgacgaactccttctgcggaccctccttcagcgccttcttggcggccttcttctcctcgtcggtggcgtcttcggccagaccgcggggcttgccctcctcctcggcgtagaaacgcaggttctccagcagcatcacctcgccgggcttgaggttcttggccatctcggcggccttctcgcccatgcagtcgccggcgaacatcaccttcacgcccagacgcttctcgatggcgggaacgatctgctccagcgagaacttgggatcgggattcttcttgggacgtcccagatgcgacatcaggatcaccgaaccgcccttttcgagcactttcttgatcgtggggatcgccgcacggatacgggtgtcgtccgtcacctcgcccttttcgttgaggggcacattgaaatccacgcggatgattgcgcgcttgcctttgaaatcgtaattgtcgattgcgaacatagctctttgattttgaattattttgatgaattgatctttcagttccttattccggggcaaatttatgaaaaatctctggaataacctcgaaaaacgggagaaatgacgctaaacgacttaatatcagagttgctacggtgtcaaatgatgacaagccgaaaaatcggaaaacgcaaagaaaagcggatttaagaagaagaatggtttgcaaatcattacccgtgaaagagtaagatttaacatatgagagatgctattgcaccgtttgtcaccgatttgcgtatcaaggtctaactcgttgatatttaactttgcaaacaaaaaaacgagtatggcaagaagtacattcaaagtgctgttctacgtgaacggcagcaaggagaaagacggtattgtccccatcatgggacgagtgacaatcaacggtactgtggcgcagttcagttgcaagcagaccatcccgaaaaccctttgggatgcgaaaggcaaccgagccaaaggcaagagcgccgaagcacggaacatcaatctggcattggacaacatcaaggcgcaaatcatcaagcactatcagcgcatatccgaccgagaggcatacgtaacggctgaaatggtgcgcaatgcctaccaaggggtaggaagcgagtatgagacactgataaaggcttttgacaaggattgcgccaacttcctgaaacgtgtcggcaaagaccgcagcatcggcacatacaaggtcatggtaagggcaaggaactatgtcgcagcctttatcaagtcattctacagacggacggatatgtccatgctggaacttacacccgacttcatcaaggagtttgcggcttatcttacggctgaacggggactgaaaaacgccaccatctggctgaactgcatgtggctgaaaggcgtggtcatgcgtgcgcactataacggactgataccgagaaatccgtttgcgcagttccatatcagcccgaatgttaaggaacgggaatatctgacagaggacgaaatcaaaagaatcatggcgcacgagtttgacaaccccaccctcgcattggtgcgagacctgttcattttcgcctgcttcaccgccttgtctttcgtggatatgaaagaactcacaacggatgaaatagtggaggtgaacggtgagaaatggatattgtcgaaacggcacaagacaaatgtcccgttccaagtgaagctgctggatattcccttgcagataatcgaacggtacaagtatctgtcggaagacaagctggttttcggaaaaatcaactattggacgatgtgcaaacagctgaaaaaggtaatggcggaatgcggaatagagaagcaaatctcctaccattgtgcacgtcatacgtttgggacactggctcttagcaaggggatgcccattgaaagcgtgagccgtgttttgggacacacgaacattgtcacgactcaaatctatgcgaagataaccacacagaaacttgacaatgacctgacgatgttcggcaacaagctgaacgcatcgttcggaagtgtaaccccataaccaagcatagccatgaaacgaagcatcatcacaacggacggcaacggcaacatcaccttgccgaccgatataggcgcaaccgccatgaacgaatgggaactttgcgacctgttcggagtaaccgccccgacattccgtgctggggtaaaggctctttgcaagaacggagttttaagggaatacggaacaaggcgaaacatacgggtatccgataattgctgtatggaggtttacaaccttgaagcgatagttgccctcgctttccatatcggcacattcggagcggaaagggtacgcaatgccgttcttgaaagactgtacctgcgaaaagagaaaacaagcatcttcttctcgctgaataccaacagtatatccaaatccgaatacttctcgtagctgaatgcctgacataattcactcggtaagtcagtaattcattaagtcagtacgacagaacgacagacgctctggttttttctcccgaaaagcgtaatccgacattcgcttttcgggagtttttccgtttgcacaacccgtttcctgtcccaaaccattgaaagtttttgtttcgggggctatttgtcaccattctgccgtgttttgcataacaacctatccgataattgattatatttttgcagctggtaattttcaaacttaaaaccatttgattatgtcagctatcgaacaacaggacagccacagaccgccatcggatggcggcatggcaaaggaagaatttatccgtgtcgggacaacgctctacaagattgtggagcaaccgagactgaacggagggtatgtgaagaaacgcatcgcatggaacaacgagaccctgcgacaggattacggcaaggattacatcggcagcgttcccaagtatgacggcttctgcaccgtacccgaacacatcggctaccgttccgtggtcggcaagttccttaacctttacgaaccgatagaccaccgaccgcaggagggcgatttatcgcatatccaatctttggtacggcacatcttcggggaacaatacgagttggggatggactatccgcaactgctctacctgcaaccgattcagaagttgcctatcctgctgttggtgtcggaagaacgcaacacgggcaaaagcaccttcctgaactttctgaaagccctttttcagaacaatgtgactttcaacaccaacgaggatttccgcagccagttcaattccgactgggctggcaagttgcttatcgtggtggatgaggtgcttctcaaccgcagggaggacagcgagcggttgaagaacctcagcaccacactttcctataaggtggaagccaaaggcaaagaccgtgacgagattgcgttcttcgccaaattcgtgctgtgttccaacaacgagtacctgcccgtaatcatagacgcaggggaaacacgctattgggtgcgcaagatagaccgcttgcagtccgatgataccgacttcctgcaaaagctgaaagcggagatacccgcctttctccatttcctgcaacacagaaaactgttcaccgaaaaggaaagccggatgtggttcaaccccacattgctgcatacagaagccttgcagaagattatccgcagcaaccgtaaccggttggagatagagatgcacgaacttgtccttgacatcatggacagtgtcggcacggatacattctctttctgttacagcgacattcttcttttgctggtacactcacaggtaaaggtggagaaacaccaagtccgaaaagtgttgcaggaatgttggaaactgacccctgcgccaaacggactgacttataccacctaccagttcaactgcaatcgggagtgtcggtatgagccgataaggagagtgggacgcttctacaccgtcacaagggagcaacttgaatccctgtaatattatcatttttctgttgaattgttgaatatgggtataaatacactgacaataaacgatatacattctcaacaaaatctcaacaagccaaaagagaagttgagagaccaccgacacccgtttgttgatttctcttttggcgagtggtttgttgagaagatgttgagaggttacgaggctgtatataaatatattacattgacaattcatcaaatcaacaaattttcatcaacttcaaaaccgtatgtaatatgacaatccaagatgtaaagcaaatcaaactggcagactatctgcaaagtctgggctatacgcctgtaaagcaacaaggcaagaacctgtggtataaatcaccgctacgggaagaaacggacgcatcgttcaaggtaaacaccgagcttgaaaaatggtacgacttcggcatcggcaaaggcggaaacatcctcgcattggcagcggaactctaccgttcggaagatgtagcctatctgctgaaacgcataggggagcggacagcatacatccgccctgcatcgttctcttttggcagacagcattccgacaatcagccttatcagggattaagggttggtgagttgtcctctcctgctcttatagcctatctgcaagaaaggggaataaacatcggacttgccaaaagagaatgcagggagcttcggtttatgaatgccgacaaaccctattttgccatcggctttccgaacatggcaggaggatatgaagtgcgcaacagatacttcaagggatgtgtcgccccgaaagacatcacccatatccgacagcaggacggacaacgatgtatgtgttacctgttcgaggggttcatggattacctctcattccttaccatccgagtaagaaacaatccgcaatacccacgattggacacgcaggactatgtcatactgaactccgtttccaatcttgcgaaagcggaaagcatattggagacctacacccgaatcggctgtttccttgataacgacacggctggacggagcacctgcaagaagctgaaagagaagttcggggaacggctgcttgataagtcgctgtactatcgtgattataaggacttgaacgactacctgtgcggtaagcccttgtcccaatcggcagagccgataaaggagaaaaagcaagtccaatccgaaagacggatgatgcagccaccgaaaaagaaagggggatttcatctgtaatatgcacgtccgctctcccaaggtatttagacagaaataccatagcttaatagagcgttttcttcacgcattactccgtaacgctaaaaacaccctatcgagccaaagggaaatccctttggaaaccctgtgcaaacgagagcagaagccaaactcgtttggattatgccgagtgcagcaatggttcatttgcataataaaccctgtgagccgatgtcacaggcagagagaagagacataacgataaccgcaaaaatagaaataatatgggatatttttcattggacataaagaaagcaaagggtacatcggacaccacgcagtccgaccatatagagagaaagataatacctaaaaacgccgacccgacaagaacgcatctgaacagggtgcttgtcgaataccccaatggcgttcacggcagggatgaagcgattgcccacaggctgaacacggcaggcatcagacggaaaatcacacacgaccaagtccgtgtcgttcgggtggttttgtcgggtacgcacgaggacatgatgaacatacaggaaaaaggagaactcgatgaatggtgcagcgacagcatccaatggctgcaagccacattcggcaaagacaatgtggttgccgcacatctacacatggacgagaagactccgcacatccacgcagccgttgttcccatcgtgacgggtgaaaggcgcaaagccaagaaagaacaggctgatggcaagcgcaagtaccgcaagaaaacaaattccgtccgtttgtgtgccgatgacctgttcaaccgccagaccctggtcgcctaccacgacaattacgcaagggtgatggcgaaatacggattgcagcgtggggtacggggttcggaagcacggcacaccaccaccatgcagtattatagggacttgaaaaagaagaatgaagtcctcgaaactgaaaccagactgttgcaggagaagaaagccaaggcgcaggaggaactgaagcaggtgaaagcggaaatccgtaccgacaagctcaaaagcgcagccaccgatacggcaaccgcccttgcaagcagtgtgggctctcttttcggaagtggaaagatgaaatcgttggaacgcaggaacgaggacttgcaagaccgcatccttgaacttgaagacgaagcccgacaacgggaacggcaacaagccaagcagatacaggagataagaaacgcttacgagcaacagcaccgcaagctgtcggagtttgcggattttgtcagacgctactttccgtatgtggagaagctgatgcccgtgataagtttcctgcgtgaacgtttgggctttaatgacgggataatcagaagactgtgcgagttcaaggaggtcgggataaaaggcgaactctattcttccgaatttaaccgaagttttgatacccgacattccgtctgctccatcaaacaggatgaaaacggtaaattcgatttcaagatagacggggtttcacacgtgagctggttcagaaagaagatgaatgagttcagagaagctatcggaataccgaagccaagacagaatagaagtatgaaactgtaaatcaaaaaaatccgtgatagtagaatggtatatcacggatttttcatacttttgtattggattgaggcaactctttccaagacatacgaaaaaaagaagaagcgttatgcttatcttgtacttgaaaacgtaggaaattttcaattagatgcaaggatagcatagtggttctcacgcatatagcgtgggctgctattgttacatctgcatctatggtttcctacgaccttcaagtaaagaatgtggcatacagttccacgcttctttaataggttaaattcctttgggaactggagattaaaaaaatgtagtgtatgagcgtaataaaaaaatggttattagctatttgtgccattatattaatgaatggatgtgcaccacttcgaatgcctgtaatagtgaggaatgctcctattgaaatgtataaatacgcatacatttccccaacaaaggaattgacatcaagcacaggaggtacatatggtgggcaatacggtatctatggttcttcaaccaccaaaagtgttaatccaagtgatgtaatagcaggaatactaataaaagaaggatatatcatattacccgaacttaaacccgaattatctaatgaaactctaatcgtcaattatggtgagagtggcaggcgtaatagaggtttaggttacacaatagaagtaactatacagtttagctctgcaaaaactaatgaaatgatatgttcttgtacagcagaaggacaaggcgaaacagaagctgatgatatccgtcaagccattagaagagccttaacaagtttattccctgagaaataacccaataatacgacagattatgaaaaagtttttagtattatccgctttagttataacttcttgtacactctctaacgaggaaaaagctgagaaattggttaaagagacgcttaaagactatctctatcaccctgattcttatgagccaatatcaacaagagttgatagtatgtttattgatgtaactactatcgagcctattatgaaaattagcgatgaaatcaagaatttgatatctaaaataaatcgctgtgagagaaaaattgaatcagcagaatcttctatggatatttttgcccccaatggttattcttctcaatactctcgtggagagtattcacgagcaaaaaaagaaaaggaagaagccaaatctgatttgaacaaatacaccaagaaactttcagaacaacttgcttttctaaaagaaaatgtcgctaaatatcacaaaggagaatttacaggttgggcagtaagccatagatttaggagtcttaatggagcaggctcaatgaccattccgggagaaatgattttcttttgcgatgaagaatttacaacttgtgggggttatgaaacagataagtttgaggacttcgtaaaaattttaaacgcagtagatgaagcaacttcggatgaagatgtaatagattattttaaagaaaataattttttgctataaattccgtatttccgtagtacgctaatttttatgcaaagcaaatattatcaactgcttttttttaatatgcaatgggcgtttattttggttatttgtataattgctatttcggttattgtaatagcgatggtacgaacacgcctaaaaaacaaatccaaagagcttgcagaaaagctaaaccatatatctgcatatagcgagaaatcaaattatgagcaagcaagagagagattatcggctcttaatgagagggcgtttatagatattccctcagacttgaataatggcttttctggcagggtaatctccgcaacgcaagaaaaaaatttcatcaatcattataaggtacatttccaagaggcatattcacttctgaagaaacttgaagcctttaacatcactccatcagaaaccatatccaaattcattaacgactttggaagaatcaacaaacttgtaaaacaacataatgatggtgttataacctttctacttgacacgcacagggactttttcgaccattgcctaaaatacccattagacaagcaacaaagacgctcaatagtttcagaagaggataattgtttagtagtcagcagtgcaggtagtggtaaaacctcttcaattgtcggtaaggttaaatatctcaccgaaatcaagggtatcgcacctgaaagaattttacttatcagttataccaacaaagcagcagccgaactaaccgaaagaatggcgaccaatggattgaaaggttacacattccataagttagccattgatattataggcaaaacaacaggcacaaaaccatcgatttgcgacaatacagattcattgtttgttaatatatatcacaaattgttagataaatcgtctttcaaaaaaagtatagtggaatactttgttgattaccaaacgaatgaagccgattgggaacaacgcaagaatgaaagacgagagcaattatcagagcaaaagaatgtgcagctaaaggcgatgttccccgatatggacggcagagccatatatgtgagaagtgaacaagaacaaaaaatatgctttgctttgtcctcgctgggagtgaaattcagatatgaagaaccatacgaacatcaattagcagatgagatgcactcacaatatcgtcccgacttctcaatatattttaagcaaggaggagtaaccaaacgcatctatcttgaacatttcggagttgatgaacacgggcttgttcctgcttggttcgcaaaagacaagggtataacctacgaagaagccaatcagaaatacaatgatggtataacttggaaaaaagcggctcacgagaaatttggtacacaacttttagtgacatcaagtgcagatttccattattctgatattagggataaactccgtaaactattagctgaagcaggtgtaccaattcaagaaaagaccgatgaggagttatacgatttagtactacccaaaggtagcaagcaggaaaaggcgtttatacgacttgttgttactttcgttacattggtaaaatcaagttgtaaatcagttaaagaggttttgaaacaagccaaaaatgcagatgatgaacgaagtgtgtttatcatcaagaatatatttcaacctgtatatgaacactacataaatgcgttaagcgatagtgaccaaattgattttaccgatgctattcttcaagccactgagatatgtcgtacttcacaccctgttgaatatgattatatcatagtggatgagtttcaagatatttctgttgaccgttacaacttcttgaaagtattgcgagagggtaatcctcctgcaaagttgtattgtgtgggtgatgattggcagtctatttatcgtttttcgggaagtgatatggctctattcaatcaattccccgaatattttggagcaacggagataaacaagattgaaactacatacaggtttggagagcctttggtttctttatcgtcgaactttatacaacgcaataaagcccaaatacaaaagaatatccattcgttcagctcagaaatgagaaccgagttggaattctatgcttatgatagacgagattactgcaatacgatagggcaacttgtggcttctattccatcggataaatcaatattcctattggggcgttactcttttgatgattactacctctcttttatgtaccaatcaattaaagagggtaatagattctactatgtgataggaggacgaaaaatagagtttttaaccgtacataagtcaaaaggtcttgaagcgaattatgtaatactcttacaatgcaataaagatacatacggtttcccatcacaggtgagtgacgaccctgtgcttaactatgtgctcactaagagcgaccaattcccatacggagaagaaagaagattattctatgttgcaataacaagggctaagataaaaacgcttgtattatacgataagcgtttcccgtctgtatttgtggatgaattcttgcaccccgaaaaggtgtcagaagaaagctatgtaaagcaccctaacgccaataaaagatggacaagaagagcagaccaatttttattgaaactgcacaatgaaggtaagagtgtcaaatatattgcaaacaaaatgggtagaagtcaaacttcgattgtaatgcgattaaacaaactaaacaaatagtcgaactttttctttgatgtaccttgtgtgcatcggactattctattatttttgtacacagaaacgagttacttgaaagcaattcaaggtagaacgcagcagattgtaccgttgccaagtcgttacctcaaaaacgggtaattatcccaaagtcctttgtataaggtactaacagaagttttccagaattacataaatattttagaaatctgttattccgataacagaaaaaatgatgcggaaccgggtccggaaggccggaaatccttccgccggcgcttcgccggcaggggccgctccaccccgcgggccgtcaatagaaggttcccttcggggcgaagatcgcatagccgaagttgaacgtcaggtacatgttcttccagttacgcaggtcgtatttcgtgagcgcgagactcaccggaccgatcggggtgtgatagaccagcgacgcctcggcgatatagtgccagcgttcgtccgcggtcgtgctcagcgatccgggcacatagtcgcgtttggcgcggaacatcgtatagaaacccgtgcggaagaagaagttgggcatcaggtcgaaggtcggcatcacgccgcccgcgacgaaacgcttgccccggaagtcgggcatgtagatcatctgcgcatgcgaaaccggcgtataggcaggcatcgacatcagcgtcgcgcctcccgtggtgaattcgggatggttggtaatcacgccgtcgacgttgacgcccagcgagaaccaccccgtgccgggcatgtcgaaatacttgtcccacgtgaaacgcgccccgacccaccggcgggtggtccgcgacaggaaccggtcggcattgaaaggctcgtacttgtcgcggcccgtcacgaaaatgcccgaaagccgcatgtcggagcctttgcgcggatagaggaacttgtcgagggtgttgcgggccagctcggccttgagaccgaagaacgaatagcgcgaatggtcggtgtcgtcggcgaaaagcacgtcggaatcgtatctgtaattgatgtgtccgccgttggcgcggagcaggaagaccccgcggtgggcgaggggcatgccggcggccaccgagaagaagctctcgctgttcttgacctgctgggtgttgtcgatcttggtgaggttgccgaaggcgccgtgccggaagttgcgcaccgcgaaattataggagtagtcgaggaacaccggcttccacatgtagaaatccgtacgtccgccgatcgcgccccacgtatagatcggccccagatagagatcggcgcccagctgctggcccacgcggccgatcgtctcgtagttgacgccgatataggcttggttgaaggccgtggaggagatgttgccgccgatggtcagtttgaagtttggcttggtgtggaactgcgcggcgaacgaatagctcccccggagcgagtcgtagcgcacatgcgggaaatccatcgtgaaatcgccgccggcgagcaccgcatacaagttgtcgcgcagctcttcgaatcccatcgggcgctggcgtccgggcgtgcgccggtccaccttcacgaagtcgcggatgtaagactccggcgcttcggccagcccctccagcttatagtcgctgaaccacagcggcggccatttggcacggaactcctcgcgtcgctcggcgtaacgttcgggcgaccagcgttcggaaacgcgttccagtatctgcggcatggccgccgtcgcatcggcatagccggcgtccatgatcgccacggcgctgttgaaatcgagcatgttgacatccacggcgcggcgcaccgtcacgctgcgccctttgggcaggtcgtagtcggtgtcgtgcatcgccagcatgaaagcctgatcgaggatgctgctgttttcgctcggcggggcgtttcccgcggtgcagatactgcccacgatcagatcggggcggaatcccacgtcgaggggccgccacggaaagttatcgtagatgccaccgtcgtagagcagcatcgaatccttcttcatcggtttgaaaaccagcggaatggacatcgacgaacgcaccgcttcgctcaggtcgccgttgcgcatcaccacgggttcgcgggcgttcatgtcgctcgaaacgcacaggaaaggcaccatcaggcggtcgaaatcgccctcggcggctgccgtcgccggcgcgaaaagctccgtcagcgccatgtcgatcggcgtcgaggagagcaggttcgtcacccggaaccgcttgccggcgcctcccacgttcatacgcacgctcagaaacgccggattgtgcccgatctgccggtaatagggagtatagcgggggtcgatgcgccccgaaacccagtccttgaccacgcccgacgcaacgatctcgcgcatctcggcgggcgaatagcccgcggcgtacatcgcggcgatgatcgaacccatcgaggttccggccacgtagtcgatcggcacgccgttctcttcgagcgcttccaaaacgccgatatggtaaagcccctttgcgccgccgccgctcatcacgacgcccaccgtacggggccgcgcagccggagtctccggattctgcgccccggcagcccctgcgcccagcagcagcaccgagataaatgagagggttttacgcaacatatctcaatttttttataactttgcacgttatacgagtggtaaaagtagggaaaaagcgtaaacaaacaaaatatgaccgacaaaatcaatgaactcctccgacgtgtcgaagagtttaaccccaaggcagcggccgagatcgaggaattccgcatcaaaatcctcggcaagaaaggcgaactgaacgccctgatggaagatttcaaaacggtggctccggaactcaaacgcgagctaggccagcagctcaacaaactcaaaaccacggcgctcgaccgcatcaacagcctgcgcgaacagctgcaggacgcagcctccgacgacggcgccgcaaccgaagacatgacccgccccggttcggccgaacaactcggttcgcgccatccgatttcgctggtcaagaaccagatcgtcgaggtcttctcgcggctgggctacaccgtcgccgacggtcccgaaatcgaggacgactggcacgtcttctcggcgctcaacttcccgcccgaacacccggcgcgcgacatgcaggacaccttcttcatcgagaagaatcccgacatcctgctgcgcacgcacacctcgtcgattcaggtgcgcaccatggagcaccagaagccgcccatccgcgtcatctgccccggccgcgtcttccgcaacgaagccatctcctaccgcgcgcactgcatcttccaccagatcgaaggactctacatcgacgaaggagtctcgttcgccgacatgaagcagtcgctgctctacttcgccaaggaggtcttcggcgaacagaccgtcatccgcatgcgtccctcgtacttccccttcaccgagccttcggccgaggtggacgtgtcgtgcaacctctgcggcggcaagggctgtccggtctgcaagggcacgggctggctcgaaatcatgggctgcggcatggtcgatcccaacgtactgaaagcaaacaacatagaccccgaaaaatattcgggattcgccttcggcatgggtattgagcgcatcgcaatgctcaaatacggcgtgaaggacctgcgtctctatttcgaaaacgacgtgcggttcctccaccagttcgacacggcactctaaaaccgcgatccatgaagcgtctgacagcgacaacggcactctgcgtactcttctgcacggctttcgccgcggggaagggtcccgccgcgaccgtacccggcagttaccccgattcgctgcgcagcgtctggctctataccgagggcatcaaacagaataccatttttcacgatacggtccgggcgcgggaatatctcaccgaggcgatccgcgccgattcgacctacgcgccggcttattacgaaatggcgaccaacggcatgtactccacgcccgacgaggcggtggagctggcccgccgcgcctaccggctcgacacgacgaacaaatggtatcaccagttcctcggacaggccctgatcttcgcccagcgttaccccgaagccctcggcgtctacaagcgcctgcgcgccgcagatccgcagaaccccgacaactaccggcttctggcggcgctctacgagcaggtccagcagccctattcggccatcgccacgctcgactcggcggaactccgcttcgggcgcatcccgatgctgagcgcgatgaaacgccaactgctgatctccacgcggcagctggacaaagccgtcgacgaagccaaggccatggtcgaagccgctccctacgaagcgcagcaccatgtggtgctggccgacctctatgcgattctgaacaaggactcgctggccatggcggagtacgaccgtgccatgcagatcgactcgaccgacgtcgccacgctgatgtcgctggccgactactacaacggccgccgcgattaccggtcggtactcaacgtcacccagcggctcttcgactcggaccagatgccgctcgacgccaagatcaaacgcttcgagcagctcacctccgacatgcggttctaccgcgaatactacatccagctcaacgcgctggcctcgacgctggccgtgcgctatccgcaggaccggcgcgtggtggaactctacgccaagcacctgatcgcctcaggcgaactggagcaggcgctggcgctctacaaactccacctcgacgaccagccgcccgtcgaaagctactaccggtcggtgatcgacatcgagagctatctccagcatcccgactcggcggccctctacatcaaccgggcgctggagcttttccccggagagatcgacttccagctctcgaaaggccacgtgctgaattacaccaaagagtacgacaaagcgataaaagcctatcagcagtcgctccgttacgcccgcaccgattcgctgcgcggcgcgatctgggggctgatcggcgacacatggcaccagaaagccgcggcgggggagtccggcgacgaagaggatttcgtgctcatcagccgcaagggttcgttccgttcggccatgaagcagtgctacaaagcctatgacaggagcctgcgctacgatcccgacaacgccatggtgctgaacaactacgcctatttcctctcgcttgaggagcgcgatctggaaaaggcgctcgccatggccagccgcgccacggccctcacggacaacaaccccacctacctcgacacccacgcttgggtgctcttcaaactgggacgtgtggacgaagcccggaaaatcatgcagcaggccgtcgccctcgacgcacaggaaagcgccgcgctgctggtccactacggcgacatactgaaggcgctgggcgagaatttcatggccgagatatactggcgcaaagccctcgaaaagggctacgacgccgggcgcatcgaacgccggataacggaaagcaaagcgaaaaaagagtaaccctgcaaatgcgatgaagccgacgaaaagctgcatactgacccttttcctgctgttcgccgcccttgcgccctccgctcaggccgaccgcaagatcgaacagcagaagcgggttatcgcggcactggagcagaaaatcgccgccgaggagcgggagatttcgaagctcaaggagggccgcgccgccaccgaggagcgcatacggcgtctggcacgccagatagattcgcggaaccagctgctcgaagagaccgagaagcaggcccgcctgctgcgcggggagatcgaccgcacggacagcgtcgccggagacctcggcagatcgctggaccgcaaccgtacccaatacgccgaaatggtgcgcgaagcctatcgcaactaccggcacaacaattatctgacctatatcttctcgtcgcgcgacttcgccgacatggcccgcaagctcaccaacctgcgggaagtggcgtcgatgcgcgaacgcaaactgcaggacatcgcggcgctctcgaagcaggtcgccgaggagaaggagctgctcgaccgccgcaaacggtcgctcgactcggtaacgctcaaactgaaagcccagaaacagaagctcgaacgcgacgcccgcaacgcccgcaccagcatccggcagctctcccagaaggagaaaacggccctccagcgcaaaatatcgcaggagcagcagctcgacgtggccatcggcgaactgcgcaaactgaccaagggcaacaaggagggcgattcgttctcgaccaagaccacgggcctgcggctccccgtcacggcgggccgcgtgaagcgctacaaggagaacatggccgaaatcacgggtcccaagggggcgcacgtcatttcgatctatgacggcaaggtcgtggacgtcaagcgcaaccgcataaccaacaaatacgacgtttacgtggctcacggcgaatatataacctcctatgccaacatggggtcgatctgcgtcgagaagggccagaaagtagccagaaacgcacagttgggcaccataggttcggcggtgaacatcatgaccatggaaacggagtacaaactcgtcttcggcatctatccgccgaatccgggccagaagctccgtgccgagaactgtttcaaaaaataacatgaggacgacatgcgacggtgcggtttcccgaaacctgctgccggcatccgcaggcagacacccgattccggcagtggccggatctccgtccagcaccggaaatccgtgtccccaacgccgaaaatctccgtccagcgccggaaatccgcgtcctcagcagcgaaacaccccggacgaaggaggaaggacgtaaaatctgaaaaatacgaaaaaatggctgtcaaatattatacggacgattgcagctaccggctgccccaaaaacggctgaccgcggagtggctccgccgggtcgccgaagcggaagggtatgaactgggcgatgtgagttatatcttctgttcggcgcagcggctgctggagatgaaccgccagtacttggggcacgactatttcaccgacgtcatcacgttcgactacagcgaccgcaaaggcgcccgcgtgatttcgggcgacatcttcatcgacgtcgaaaccgtcgccgacaacgcccggctgtacggattctcgacgcttcaggagatgcgcagggtagtggtccacggcgtactgcacctctgcggtcagggcgacaaaaccccccgcaccaacgcgcagatgcaccgcaaagaggacaaatacctgaagttctgggaggagcaataacagccgtcttttgcgtgcgattccggcagggcagggccgaaaaaacgcccccagccggagaaccaaacaagaattgagaacagagcaatgattttagaatacgatattatcgtcatcggcggcggacacgccggatgcgaagcggcctcggccgccgcgcgtctcggctcgcgcacgctgctgcttacgatggatatgaccaaaatggcctcgatgtcctgcaacccggcagtcggcggagtcgccaaaggtcagattgtcagagagatagacgctttgggcggacaaatgggccgcatcacggacctcacgaccatccagttccggatgctcaaccgttcgaagggcgccgccatgtggagtccgcgcgcccagtgcgacaaatcgcgcttctcggcccaatggcggcacacgctcgaaaacaccgtgaacctctacatctggcaggatgcggcgacggagctcctcttcgacaccgccggggtcaaaccccgcataaagggagtaaggacccaaatgggcatcgagttcgcctgccgcgccgtcgtgctgacttcgggaacctttctcggaggaatgatgcactgcggcacttcgcacgccgaagggggcagggcgggggatgccgcttcgcacggaatcacggaatccctgcgcgccataggattcgaaacgggacgcatgaaaacaggcactccggcgcgtctcgacgcacgcacgatcgacttcgaatcgctcgaaccgcaatacggcgacgaaaatccggacaagttctctttttcacctgatacacaacctgttaagcatcaactgccttgttttctggtctacacttcggccgaggtgcacgacctgctgcgcaccggtttcgaccgttcgcctctgttcaacggaacgatcaaaggaataggtccccgctactgtcccagcatcgaagacaagctccggacctttgccgacaaggatcagcaccagctctttctggagcccgaaggcgagtcgaccaacgaatattatctcaacggattttcatcgtcgctgccttgggacatacagtgggaagcgctgcacaaaatccggggattcgaagatttgcacatattccgccccggttacgccatcgaatacgactattttccgcctacgcaactgcaccattcgctcgaaacgaaactcgtttccggcttgtatttcgcaggtcaggtcaacggaacgaccggatacgaagaggccgcggcgcagggactcatagccggaatcaacgcacaccgggcgctgaaaggggaagaagccgtggtattgcagcgcgacgaagcctacatcggagtactgatcgacgatctcgttaccaaaggcgtggacgaaccctaccgcatgtttacctcgcgtgccgaataccgcattttgctccggcaggacaatgcggatctcagacttactccgatcggatataaaatagggctgatttcacaaaaaagatacgcccatttcaccgaaaaaaaagcatccgtagaatcgcttatttccttcgcccgccggcagagcatcaaagcagccgaaattaacgactatttagaatcggtaaattcggaacctttaactcagggaaggaagctatacgacatactgatgcgcaataatgttacgttcgaatccctctcggaagcacttctaaaactccgaaaattcatctcggacaacaacatttcagccgaagcaatcgaagaagccgaaattcaaataaaatacaaaggctatatagaacgtgaaaaattcatcgcagaaaagcttcacagactcgaaaacattcgcattcccgaagatttcgactttcattcgatgaactcgctgacgatagaagcccgtcagaaactgacccggatacgcccggcaacaatagggcaggcgtcccggattccgggagtttccccggctgacgtcaatgtattgttggtgaaattcggaagataaaaccaaaagtgctcaacacagttccacgtggagcaatttagtgaacacaaacccctatatgatcacaaaccacaacacatagttccacgtggaacaaacttaaaaggccgctcgaatgagcggcctttttgattcaaataaagagaatatcactctacaattgtacaccaattatacttatcctcggcacgaccgtattgaatatcctgaagacgtgtgtaaagttccatacaaaccttacctacttcagtgccatattcataaatatcattcgtctgcatatcgaaaatcttcccgataggggagataacagccgccgttccgcagccgccgcactcctcgaaggtaggaagctcctctacaggaatcagacggtcttcgacctcaagccccatatctcgcgccaactgccgcagactcttgttggtgatggaaggcaatacagaagaggattttggcgtaatatatttaccctccttaataccgaagaaattgcaggctccgcactcttcgatgtacttatgctctgcggcatcgagatacatgatattcgaatagcccaatttatggccgttttcacccgacagcaggctggaagcatagttgccgccgaccttcacgtcgcctgttccacgtggagcagcgcggtcctgttcacggtctatggcaacggagataggcttgatgccgtctttgaaataagcacccacgggagagcaataaacgatcagcaaagcatccttggcaggtttgacccccaatccggcagtcgtaccgaacataacgggacgcagatagagtgatgcgccggtaccatagggaggaatatatttttcgttacgtttaaccacttcgacgcaggccttgacgatcatttcgatcgtcgggacgggaaggcaaagacgttccgccgaagactgcaaccgcttggcgttctcctctacacggaaaagacggactttcccatcgacgccccgaaaggctttcagcccttcgaacagctcgataccgtaatgcagacacgacgccgacatgtgtatcttgatatactcgtcgcccgtgacctccatctcactccatttgccgtccgtataataatagcgaacgtttgcgtcggtcttgcgataatcgaatcccaaggcaccccaatccatattttccattataataagttttaaaggttttacaacattatcccacgacggcgccgctgttcgtcgcctcattcgggctcagcagacgcagttttccggaggcatcctcggccatcagaatcataccgcgcgacaaaatccccttcaattcgcggggttgcagattgaccaacacgagcacctgacgtccgaccaactcctcaggcgtgaagtattcggcgattcctgatactatttcacgctgatctatacccgtatcgaccgtcaatttcaacagtttcttcgttttcgccaccttttcggccgcaagaatcgtcgaaactcggatatccattttctgaaaatcgtcgaaacttatcgcatctttctgaggttcaacctgttgcgctgcctcagccgctgcgttggcctctttggtcgccgcaagtttgtccagctggcgctgaatcacgtcgtcttcgattttctcgaacagcaaaaccggttccccgatcttatgcccggcggcaatcagatccatcgtccccaactgttcccatccgaatttctcgacagagagcatcttcagtatcttcgcggcggagaagggcatgaaaggttcgatcgcaatggccgtattggccgtgatctgcaacgcgatgttgagaatcgtcccgacacgttggggatcggtcttgacgactttccacggctcggtatccgcaaggtacttgttaccgatgcgggcgatattcatggcgtctttcagcgcttcgcggaaatggtaatgttcgatattggactccagcgacgccttcaccgcagccacctcgccgacagtctggcggtcatagtcattcagttcgccgcaggccggaacttccccgtcgtaatatttccgggtcagcaccagcgcgcgattcacgaaattgcccagaacggcaaccagctcgttgttgttgcgggcctgaaaatccttccacgtaaagtcgttgtccttggtttcaggcgcattggcgcagagtacgtaacgaagcacatcctccttgcccggaaactcttcgaggtattcgtgcaaccacacggcccagttgcgcgaggtcgaaatcttgtcgccttcgagattcaggaactcattcgccggcacgttttcgggcaggatatagccgccgtgcgccttgagcatcgacgggaagacgatgcagtggaaaacgatattgtctttgccgataaaatgaaccatcttggtgtcctccgacttccaataggtctcccaatcgggtgtaaggtcctttgtagcagatatataaccgatcggagcgtcgaaccagacataaagcaccttcccttcggcgccctccaccggtacgggaatgccccaatcgaggtcgcggcttacggcacggggctgcaaacctccgtccagccagctcttgcactgtccgtaaacattgcttttccactctttgtgcccttcgagaatccactcgcgcaggaatccttcgtactgatccagcggcagataccagtgtttcgtctcacgcttcacgggcacggaacccgacacggcgctgtgcggatcgatcaactcgtcgggcgagagggtagagccgcacttctcgcactggtcgccgtaagcgcggtcgttgccgcatttgggacaggtgccgacgatataacggtctgcgaggaacgtctgcgtctcctcgtcgtaatactgcatcgaagtctgctcgatgaacttcccctcgtcgtacaacttgcggaaaaattccgaagcggtcttggcatgcgtcgccgacgaagtccgcgaatagatgtcgaacgacattcccagcccctcgaacgactttttgatcatattgtggtaacggtccacgatctgctgcggcgtcaccccctccttgcgggccttgatggtgattggcacgccgtgttcatcgcttccgcagaccgaaatcacgtcgcggcccctgagccgcaggtaacgggtataaatgtccgaaggtatgtaaactcccgccagatggccgatatgcaccggaccgttggcatagggaagagccgaggtaacgagataacgcttgaattcttttgccataaaaacagatacagtattactaatttctgtcaaaattagtaatttttaggctaaaaaaaagcaaagcgccattatttgtttacagatggtaataaacaaaaaccggaacctgaaatcaggccccggttcaacggtcgattccgcttcggtcagtcgatctccaactcgtcgatcagccatttcgcgccggcgaacttgtcgatgacgaagagcacgtagcggacatccacggcgatcgtgcgctgcagctgcggctcgaaagccacgtcgcccgacatcgcttcccagttgccgtcgaacgccagaccgatcagctcgcccttggcgttcatcaccggcgaacccgaattgccgcccgtaatatcgcagtcggccaaaaaggccaccggaagttcgccctcggcgttggcataacgtccgaaatccttcgcggcgtacagctccttgagcttgtcgggaaccgtaaactccgtaggattcttgggatcttccttctccatcacgcccttgagcgtcgtataatagttgtagcgaataccgtccgccggatcgtagggcagaacgcggccgtaagtcaggcggatcgtaaagttcgcatccgaagcccacgccttgtcgggctgcatgcgcatcagaccggcgatgtagagacggtgcccgtccttgaacctgcggttattctcccgctgggcatccgccagttcgagcagtttcgcatcgagcgaacgcacgaatacgaccgccggatcggcatcgcgttttcccaccgaaaaatcatccacgaaggccagcgtgccttcctcggtggcgaaaaccgagttatcgtacagataatcgacataagcatccgtatcgccgccgaaccgcttgtcgatcacttcggcgaacaccgtcggaaggtctccgcatttctccttgacgatctgcatcatgcgcttggctacacgtcggtccgtcgccgggttgtaatccttgtagaaagccctcatggcctccttcgaacgcgcctgatcggtgatcttctccacggcgaggaacgaacgcgccggcgtcaggatctccacggcccggtaaagcgcctccctgagcacctgctcggccgcaaaagcggaagcgttgccttccaccgcttcgcggatgcggtccagcgcatccatatagccttcggtcggcagcgtattggcttcggcccatttccggaaagccgcctcctgcgcctctttctgcgccttgacgttcagtttgcggataccgcgcgacatgccgatcgaattcttccagtaattcgacgactgggcgtatttcgaagcgtactgaatccgcaccttgtcgcttgcggccatatcctccttgagaatggcctgacgctcgccgcggatgaagatgcgctgcggattctcgatatccagcatgcggtcgatctcgaacgaagtcatgtaacgcgacgtcgaaccggggaaacccatgatcatcgcgaagtctccctccttgtatccgtccaccgaaaccttcagaaacttgtcggccttgtaagggcggttttcgggcgcgtaatcggccggcttgttgtcgggtccggcatagacgcgaaagaccgagaaatcgcccgtatgacgcggccacatccagttgtcggtgtctccgccgaacttgccgatcgaagtggggggagttcccaccagacgcacgtcgctgaaaacctcgatcacgaaggcgaaaaactggtttccgccgaagaaatccttcaccagcacctccatgccgggatagtcctgcgcaatgcggctgcgcacggccgccgcatgttcggccacgatgcgcgcccgctcttcgcccgaagccacgtcgggcacatatcccagaatgtcggaagtgacgtccgaaatcttgcggataaaacgcaccttgagtcccggagccgggatctcctcttcgcgcgacatggcccagaaaccgtttttcaggtagtcgtgttcgacggacgacagcgcctgaatcgaaccgtagccgcagtggtggttggtaaacagcaggccgtcggccgaaacgatctcgcccgtacatccgggaccgaagatcacgatggcgtccttgagcgaggatttgttgacgctgtaaatctcctcggccgaaagcttgcacccgcgggccttcatctccttgatattcattttctgaaggtagggcagcagccacattccctcgtcggccgcagcggtcaaagaggcgcacgccgcggcgatcagtaaaaagagtttcttcatacaggattgttatttgatatttatcatgttcaggatcgaacgctcggccctgcgccgcacctcttcgtcgagcacgatttcgggcgattcgttttcgagacacgcgcagatgttttcgagcgtcaccatcttcatgtacttgcagtcgttgcatccgcaggtctcgtcgtcggggggtgccggaataaacgtcttgccggggtaacgcttcttcatctcggcgaggatgcccgattcggttaccacgatgaactcgtcggcgccgctgcggccgcagtagtcgaggatcgccgccgtagaccccacgaagtcggccacttcgacgatataggcccggcattcgggatgcacgacgaccttggcggccggatgctcctttttgagctgcagcagcttctccagcgaaaattcctcgtgtacatgacatgcgccgtcccacaacacgatattctcgcgtcccgtcagctttttgatataccctcccagattgcggtcgggcgcgaagatgatcggtcggtcggccgggatcgactgcacgaccttcagcgcattggacgaagtgcagcagatatcggtcagggccttgacgccgaccgtggtattgacgtacgaaacgaccgtatggccgggatatttcgccttgaaggccgcaaaatccttctcatcgcacgactcggccagcgaacatcccgcttcggggcagggaatcagcactttcttgtcggggcagagcaccttggcggtctcggccatgaagtgcacgccggcgaacaggatgatgtcggcgtctaccgactgcgccttgaccgagagggccagcgagtcgcccagaaagtcggccgcctcctgcacttcgggcgtggtgtagtaatgggccagtatgacggcgcgcttgcggcgcttgagttcgtcgatccggcggcggatctccgcggagttattgatcttcattttttatttttactatttattaattttaaataaagatataagaatagaaataatagctgttgatactgttcacaagttcccccgcgatttttctctcaacattttctcctcttctttttcttccgtttttatttcaataatttgattgtcaatccataaaaataataatcgacaattgttcacaactgttttcaacatttcgacagtccttttttgtgaacatttcgttgctcttttgggagtcggccgctgactataattcggcaaaactttttttggtttcggcgaaaacttgtatataccctccctgtttcgggatttgcaactcttcggggccggaagttttcattatttatcgtcggttatcaacagggtttctaacacgatttcatcaccttttcgacagtcttttcggcgatttcgcggtaccatttttcgaccctcggatcgatgcccgccgcagggcgtccctcgtcggaaccctccatgatggactgtacgatgggtatttcgcccagaaaatccacgccgttctcttcggcgtaacggcgcgcgccgcctttcccgaagatatagtaccggttttcgggcagttcttcgggcgtgaaccacgccatgttttctatcacgcccgctaccgggatgtttacgttttcattgcggaacatctccacaccgcgtaccacgtcggcgaccgccacctgctggggcgtcgagacgatcaccgcggcgtcgattttcagttcgcctataatagagaggtgtacgtcgcccgttccggggggcaggtccgcgagcaggaaatcgagcgttccccacttggtctggtggatcatctgcttgagggcgctgaccgccatggcgccgcgccacaaaagggcgtcggtcggtttgatgaagaatccgatcgacatcagccgtatgtccatcgactcggccggaacgatgcggtccgttccctcctcctgcaccgcatcgggcaggtacccctccacgccgaacatcttgggctgcgagggaccgtaaatatcggcgtcgagaattccgacgcggtaacccatgttgcgcagtgcgacggcgaggttggctgtcacggtggacttgcctaccccgcctttgcccgacgccacggcgatcactttggcgatgccgccggtggtcgtcttgagcttgggttcggggcgcggcgcggcgccgccctccttgatgacgaccatgacgttttgctgcgggaattcacgccggagaatctcctcggcttggtttttgattttcaccgcgaacgggtcgcgggccttggcgaaacggagtacgacggtgatcttgccggctccggaggcgatatgctcgataaagccgctgccgacgatgtcctgtcccgtttcgggatggacgacggacgtcagcagatgtctgattttttcttccatgattcgtgttgtgactacaatcgcaaagataacgtatattttgcagaataaatatagcagggcctattattttatcgaaaaacgataaattttatttgtttttcgtaaaatttccttatatttgcaaagtaaatccggacgcggaacgaaacaggacaaacaataaacgatacgttatgaattttatcaagacttttctggctgcgatcctcgccttcgtcgtggggtcgtttctggtattttttctctggatattcattctgctgggcatagccggctcgatggagaagacggtggccgtgcatgcggagtcgatcctcaagatcgacttttcggatgtgctgaccgacgctccgtcgagcgatcccttcgccgggatcgacttcgccacgctgcgctccacgcgccagcttccgctgatgaaggctctgcgcgcgctcgaagccgccaaggacgacagccgcatcaagggcatttacctgcgcatgaacggcaacggcggcgtgatgggcgcggccctgctggaagagctgcgcgaagcggtcgtcgattttaagcagagcggcaaattcgtcgtcgcttacgacgagacctattcgcaggggaaatattacctcgcttcggcggccgacaaaatctacatgcagcccgaaggcgccatggactggtcgggtctcgcgttcaacctgatgttctacaagggcctgctcgacaaactcgacatcaaggccgaagtcttccgccccacggcctgcaaatacaagagcgccgtcgagccgtatatccttcccaaaatgtcggacgccaaccgcgagcagatgcaggcgctcgtgaattcgatgtggaacaccatcgccggctcggtcgccgaagcccgcggcatcgacctgaaggagctgaaccgcattaccgacaaactggaggtttcgctgcctgaggatgccctcgaacacggcttcgtggacagcctgatctacgaggatcagatgaaggacgtattcgccgaactgggcgtagcgtccgattccgacggagagtataatttcatcacgctgggcgaatacgcttcgcaggtaggcgccgacctcaaaaacatctcggccgatcaggtggccgtcgtctatgccgacggcgcgatcgtcgacggcgaaggcttcggaaaggagatttacggcaatacgctggctgcgacgctggccggcgtgcgcgacgacgagaaggtcaaggccgtggtgctgcgcgtgaactcccccggcggcagtgcactggcttcggacgtcatctggcgcgaaatggagctgctgaaagccgagaaaccggtggtcgtttcgatgggctcctatgccgccagcggaggttattacatttcgtgtcccgccgacgtcatcgtggccgacaaactgacccttacgggttcgatcggtgtcttcggcatgtacctcaacaccatcgacgcctttaaaaacaagctgggaatcacgttcgacgccgtgaagagcaacacctcggccggtatgggggcgacctcgccgctgaccgccgccgaacgggcttcgatcatgcgcggcgtggacaaggtctatgagaccttcacgacccatgtagccgaagggcgcaacctgccggtcgagaaggtgctcgacatcgccgggggccgcgtctggtcgggcgaagatgcgctcggcatcggtctgatcgacacctacggaggtctgaaaacggccatcgccatcgccgtggacaaggccggtctgggcgacagctaccgggtgaccgaggtgatcgaggagccgacgggattcgccgccttcatcgcgtcgctcaacatcagcgtccgcgaggccatgacccgttcggaactgggactgctgatgaaggagtacaagcaggtgcaggaggctaccaaacagcagggagtcgtcatgtactacccctataagctggagctgcgttgagaccgcaccgcaaaccgatggactgaacctgcgcggacgctgtcccgcaagccgatacgaaaagcggcccccgtgcggggcccgctttctattttgaccgggaaagcgggttcagattacctctccccgttttccgaagaggtcccggagggcggatttccccccccctcggacaaactcccgccgttgcgtaaatcgtcgagtttgcggcctatctcctcgacctgcttccggtcgggtgaaatcaccgtcgagccgaatttgcgccggtattcgcccggcgctgagccgatgcgctcgcggaaggcgtggttgaaattcgagatgttgtggaatccgcaccgggtgctgatttccgaaatcggagcgtcggtctccacgatcatctgcgcggcgcgcacgatgcgaaacccgttgatataggtccagagattctggcaggtgttcttcttgaaatagcggcataccgacgaaggggacatgcccacttcggcgccgatgtcttcgagcgtgattttgttgtggtagttgttttccacgaactgcaggattttcttgatgcgttcgttgccgtcggcctgcgtcttgtaatccgtcgttccgataatgtgcatttcgtccggtcccgccgtggcgaggtcgttgagtatgtccagaaagagcgccaccgactcgaatccccgcagtccgggcagctgcagcagccgttcgcggacccggtccaccaccatttcggagaaatgaagacctgcgacgggcaggctcagcatcttctgaatgggttgcaggtactcggtttcgaaaagctgccagttgggcatgtcgcggctgaactgcacagccacggcttcgcagtcgatgtcggcataggcttcgtcgcgcgtgtagcagtgcggaacgcccggaaaaatgatgatcaggtccttttcggtgaaatcgtcagccgtacggcccgtgatgcgcgtgcccctgacgttcagggtcaggctcagcatgtagtcctcgtgaaaatgcagcggcggatccgactgtttgtcggaccagtactgcgtgatgaacaagtctttttcaggccgtggcgcaaggtcttttaaaacatatttcatatgtcgggacttttaacaaatatacgaattaatcggatataaaacgcaaaccccgtgtgatttaatctgccggaaggcgaaaataaaatacgacgaacccgtctccatgttcggagacgggttcgttgcggatcatctggaaatcgttcgtcggtacgcgcggcggctgttttctaagacatgggaacagcgctccggcgtgctgacgccgcccctgctcaggggatgtaggaggcgatggatttccaagtgaggtttttccattgctgcccggcggcggtcgggtattccacgcccgccgcgttgaggaacaggttgcaggcggcgggaacgtcggccgaggtgaatgtgtcgttggccagcgtgatggccgtcgtcgcacccagcttcagggtcgtcagggcggtgcatttgtcgaaagccttggttccgagcgaggtggctttgggaagatcgacctccttgagcttcgggttttcggcgaaacagaagtttccgaccttctcgacattgggaagcgagatgctctccagagcgtcgcacccgcgaatggcattcatacccagctcttttgcggcgggcaggtcgattgccgtcaggctcttgcagttctggaacagcgacgaggggaccgtttcgagcgtggccaaaagaggaacgtcataactcgtcaggccggtcattccgctgaatgctccgccgttattgataaaggtctccaatgcggggagtgaaatggtggtaacgagggcgcagccgttgaagacggttccgccgatacttttgacgttcggaaggtttatggttttgatattcacacaaccgctgaatcctccggcaattatggtctcgaccgtgggcatatccactttcgtcaaaccttcgcatttgttgaaagagaagttttccaccttcttgagtacgggcatatctatgtccgcaagagcggtacattcggcgaacatatataaggacatgttctccaataccggagcgctcaccttggtgatattcttgcattcgcggaagaggtatttgccgggtgcggtcagcttcggcatgttcagctcgcccgtgaaaccccagcacctgaagaaggcgtaatcgcccgttgtcgtgacattggagagatccacgttcttgagcgtgatacattcgcggaaggcacgttcgcccacagtcgtgactttggaaaagtccaccacgtcttcgagcgccttgcacccttcgaatgcgctcgtaccgatggtcgtgatattggacaggtcgatcgtcttgagcgtcgaggtgcagacggaggcctgcgcgatgaagaacatcttgtcgctgatggcggtgcacagggggaaattgacctttgtcagcgattcgcagtcgatgaagcagccgcttccgaaagccgtggccgcggggaacgaaacctccttgagggcgtaacatctttcgaagcactgggcgccgacggactcgactttttctccgctgaagctcagcaggccgttgcaggcgtacatggccatcttctccagcttttccacattgggtatgtcgatttgcgtcagtttggtcgaataggcgaaacacgactctccggccgtcttgagtttgggcagcgagatgctcgtcagagcgccgcaatagaagaaggcgctgcccgcctcttcgagattgggcatcgagatctccgtgagagcggtgcagctgtagaataacgagttgggagcataggtgagtttgggcatctccgccttggccagcgctttgttctgcgagaaggccgattcgcccacttcggtcagttcggggaagacagcctcttcaagcgtccacaggtcgctgaacgctcgttcgccgatggtctgcaccttgggaaggtgaacggtgcggagcgatgaattgttgacggcggtgaggacgctgttgcgaaacgcattcacgcctaccgacgttacctccggcgcattcagctcttcgagtttggtctgtttcggtgcgcgtgagccggcatcgtacatgaaattgtcgggaatggctttggcgtcggtgagttcgaggaagagaagattctggaatttgtcgaagatcgcggcggttacctcgtccgtcaggtcgccgccgacggacagtctggttaccgtggccgctttctctgcgtcatacgcgatgatttcggaggctgcaagtgaaagcaggtcggtgaattcggctctgatttcgatatttccccccccctccggcagggtgaacgtcgtcgggttttccgtcggattttccagctcgataccgccgctgaggaccgtccatttcaggaagaagaagttctcggcaggcgttgccgtcagggttaccgtttcgccgggaatggccgacgcggggttggcttcggccgtgccgttgccgtcgtcggttacggtgatctggctcggaacggcggcgaactcggctttgatctcgacgtttgcggcgggcatcgcgaatgtcgtcgggttggccgtcgcacttttcagttcggcgtcgccgctgacgaccgtccatttcgcgaacgagaaattttccttgggcgtcgcagtcagggttatcgtttcgcccgcggcagccgacgcaggagtggcttcggccgtgccgttgccgtcgtcggttacggcagtcgtgtacagtttcggctctttcgtctcatcggaacaagaggtggccgtcaatgtgcaaaccgtcgctgcgtagagaagcgcggatttccaaaatttcatagcataaggggtttttagttaaaaaatagggataaaatattgttgatggtgttcgagatgacatggtgcccgaatgataatgtactttcgatttgttattaaaaaaccgtatttggtaaaaatatcgtactttttatggagaaatagcgcgtgattgttcgttcgggctgtggtgtatctttctcgttattagtattttattgttgcaatgtaataataatttctgaaagtgcaaatttgttaccgcatgtttcggccgaaaatcggtccggcacggcgcgacccgatacggcgttccggcgaacgccggaaacacccttctgccgttgcgatttcctccgtccgggggcggagaagcggacgcgggacgctgaaaaatcagaaatcctttccgcctttcgcatttaatgaatatctttgcacatatgacagtgatcagattgacaaaagagttctccttcgaggcggcgcacgctctggacggatacgacgggccctgccgtgagattcacggccactcctaccggcttttcgtgaccgtcaagggacgccctatggccggcgaaggagaccctaaatgcgggatggtgatggatttcggggtgttgaagcgcatcgtcaacgaagagatcgtgtcgcacttcgaccactccctcgtcctgcgtcagacgccgtgcaacgcgtcgctgcgggccatgctcgccgaacgtttcggcaatatcgtcacggtggactaccagccgacctgcgagaatatgctcggcgatttcgcccgccgcatttcgcgccgactgccggagggcgtggagctgcattcgctccgcctgcatgaaaccgcgacttcgttcgccgagtggtttgccgaagataaccggtaaggtgtctcattcggaacacatgccgtatgcgcttcgctccgtccgggccgtgcggcgtcatccatgcgaaactattattgacgcgacttcttatatatgaaaaaactttttctcgttgacgcctatgcgttgatcttcaagtattactatgcttttctgggccgtccgatgcgcaaccgcgcgggcatgaacacctcggtggtgttcggcttcgtcaagttcctgcgcgacattcagaagcgcgaacggcccgacctgctgggcgtggcgttcgaccccaagggcggcagtttccgccgcgaggtttttccggagtacaaggccaaccgcgccgagactcccgaagacatcctgctttcggttccttatgtgaaacgggtgctggaggcgatgtgcattccgattctggaggtcgaaggctacgaggccgacgacgtgatcggcaccctgtcgcagaagggcgtcgaagccggttacgaggtcttcatggtgacccccgacaaggactacggccagctggtgcgcgacaactgtaagatttacaagcagaaaggcgcggacggaagcatcgagatcgtggaccgcgattcgatccgcgagaagtacggcatcgacgatccggtccttgtgcgcgacatcctcgcgttgtggggcgacgcttcggacaacattcccggcgtgccgggcatcggcgagaagagcgcctgcaaactggtgcaggagtggggaacggtggagaacatcctcgacaacgtgtcgaagatcaagggcaagcagggcgagaaaatcgccgcgtggggcgataaactgcgtctcgccaagcacctgaccacgatctgtctcgacgtgccgattcccttccggcctgaggaccttacggtctgcgatccccatatcgacgaactcaaggccgttttcgcagaactggatttcaaggcgtttatgaacgacctgacgaacctcgcccctcccgaagccctgcccgaaggtccccggcaggaggcgcagacgcagctggccgagatggcccgcgccaagtcggcggccgcgaaacgggccgcgctggtcggtcagggcaacctcttcggcgacccggtcgtggagatgcctgcggcgtcggacgttcccgccgccgaattgcaggccgaagcgatgcagttcaagacggcgcagaccacgcctcacgactacagactcgtggaggacgccgcgcagctgcgcgacgtggtggacgaagtcgggaaatacgaagagttctgcttcgacaccgagacgacgggattcgacatcttcaacgaccgcatcgtcggcatgtcgctggctgtgaagcctttcgaagcgtggtacattcctttcaaggaggagaatacggcggaatacgccgaaatcgtgcggccgcttttcgaaaacgaccggatcgccaagatcggccagaatatcaagttcgacctgatggtcctgcggcagctgggactcgaaatccggggccgcaagtacgatacgatgatcctgcactacctgctcgatcccgaatcgcgccacaacatgaacgcccttgcggagaaatacctcaactacaagccgatcgagatcgaaaccctgatcggcaaaggctccaagcagctgacgatggatctggtgaacgtcgagcgcgtcaaggagtacgccgccgaggacgccgacgtcacgctgcggctcaagcatgcgctctatccgcagatcgaagagcttggcctgcaacacctctatttcgaaatcgaggagccgatgatcgccgtgctggccgacatcgagatggcgggcgtgcggatcgactccgaggcgctggccgtctattccgtggagctgagccgcaggctggccgagctggaggccgcgattcgcgaggaggccggcgaatcgcagctcaacatcaactcggcgcgtcagctgggcgaggtgctgttcggcaaaatgcgcatcgccgagaagcccaagatgaccaaaaccaagcagttctgcaccgatgaggattacctgcagtcttttgcgcacaaacaccgcatcgtcgatctgatcctcgaataccggggtgtcaagaaactcctttcgacctatgtcgaggcgctgccccagctggtcaaccgccgtacgggacgcatacacacctctttcaatcaggctgttaccgctacggggcgcctttcgtccacgaatcccaacctgcagaatatccccgtgcgcgaagagatgggccgccgcatccgcagggcgttcatcccctccgacgaggagcatctgctgctctcggccgactacagtcaggtcgaactgcggctgatggcgcatctttcgggcgacgaatcgctgatcgcggcctttgcgcacggcgaggacatccacgccgcgacggccgccaaactgttcaacaaaaccctcggcgaagtgacctccgaggagcgccgccgcgccaagaccgctaatttcggcatcatctacggcatttcggccttcggcctgagccagcggctggagattccccgcaaggaggccaaagagattatcgacggctacttcgcatcctatcccaaggtgcaggagtatatggacaacgtggttgccaaggccaaggaagagggcttcgtctcgacgattttcggccggcgccgctacctcaacgacatcgcttcgcacaacgccatcgcccgcggccttgccgagcgaaacgccgtgaacgctccgattcaaggctctgcggccgacatcatgaagatcgccatgatcaacgtacaccgccgtttcgccgctgaaggcatccgctcgaaggtgatcctgcaggtgcatgacgaactggtcgtcgatatgctccgctccgagcaggagcgcgtcgtggccatcgtcaccgaagccatggagtccgccgccgcgctcaaagtccgtctggtggtggattacggcgtgggcggcaactggctcgaagcgcattgatcggaatatctgattccaagcgttttgcgcatttatatcgaatccccctttccaaagggggatttttattgtggcatctctttatgtgtttctctgcaaaacgacaggccggacccgtcgggtccggcctgctcgcgtcgtgttccggaggcgtcagaacgatataccgacgcgtatgccgaagttgttgaggttgtttaccgagtaggtcaggatatcgccgctgttggtggcgtagctgtagtagagcgccacgtggaaaccgaagcggtagtccggacgcgggaagatgctaacgccgatttcgggcgagaggtagaatccccacgtgtcggtgtactgcttgattacgtagtaataggacgagaattctgcatagttggcgcccagcttcagacccgcatagggctggaatacgctgtccggaagccatgtgtagcgtcccgtgacgccgaacggcagctggaacgagccgtgtttctgattgacggtcagggccgagccgtcgcccagatcgagcgtctggcgcggaatgctcgaaaggttggtctggtaggagatgaagggacctacggagaccgacggcgtgatgaagtagccgccttcgaagttcatgccccatcccgacgccttgtcggcataggcgctgcccagcggcacgcctacctgccagtcgacgttgatgtaggagttggggaaaatctgcgccttgcccgtacgcgcggctgcgagcagcacgacacagagtgcgatggttttgagaacctgatatttcgatgttttcataatcggacgtgttttgcggttaaattattttttcagataaggcgactgatcgaaagcctgttgcacggcgtccaccgtgcgctgctggttcagctcctccgacgaggtcagcagcccgccgatgaagctgtcccagatcacgggcagcttcttgccgctctcttgatcggcttcgagattcatcatctccacgagcagcgaaccggccgtatatccgtagtaaacgctgtagggatagtgccagccggcccagtcgccccagtaaccgggcgtccagtaatagggatagtaccaccaccagtagggatagtcgtaacccacgaaataggtcactttctgcacatagctgagctgcaggccgagattggccgcatctttgtcgtcggtacgggtgtagcctgcggcgttcatgcgtcctacgacggtattgacgatctccagcgcattggcgtctttccagtattccgtcttgtcggcggagccgatcagcaggatgctgtcgggaatgtagtaggtgtcgaaggcggcgaaatcggcgtcggtgtcgtgagcggtgtagaccagataatctttgtggagactcgatgtcgagggctctttctggcacgcgcaaaacgcaactgctgtgagtgcgaatgcaaggtagcgtaattttttcacggtcatgattttgaatttttagtttgctgtcagataccgtgttcaaaattcgttccgcaacctccgttttgcgccgtgttgtccgatctggctataaagaagcggatttgcggtatgaaaatcggacgttccctgcttttgaagtgcaccccaaatattggacggattagtatttgtttagatggcatgagttcggtattgtaccgggctcatgttgtttaagtatttctttatccgcttgttattgtagtagtcgatatattcttccaattcttttcggaaatggtctatggatgagaatttttgcaaatataataattcggacttcaataatccaaagaaactttccatagcagcgttatccagacagttacccttgcgcgacatgctctgtgtaatacctttctgtcttaaacggagctgatactgcttcatctgatactgccagccctggtcggaatgcaagacaatacccggagaatccggtattctggcaaacgcatcgtccagcatcttcatgatctgcataaagttagggcgttcagctattttatagctaataatctcccggttatataagtccataatcggcgatagatataactttacgccgcaaaccgaaaattccgtaaggtcagtaacccacttctgattcggtttttcggctgcaaagtcgcgttgcagaagattgggcgctatccgtccgatctgtcctttgtatgaacagtatttacggagcctgacctgactttttatcccgcaaatattcatcagcttaagtacggttttgtgatttatcgcatatccgatcttattcatttcaacggtaatgcgccgataaccataacgccccttatgttcgtgatataaccttataatactctctttttcgcgagcatatttatcgggttgttttgattttctgaagtgataataaaatgtgcttcgcgccatccctgcggctttgagcaatactgaaagccggcactgcggccttagtccttcgatggcttgggctctttcccgctctcgcggacaatgcgctcctcgactaaggcctgcaatttttttaagtaagcattctcggcacgaagatactccagttccttaagcaactcttcgtgcggagtcgttttgagtttgacttttttagtcttcgatttactcatggccggcctccttctttgcggtttacgccgcaggccttcagcaccttggttttgatagagccgctcccattgacgaataacaaaagggcccggaatgccgaaatgcactgctgtctccagcaaagatagatgattttggtgcatatgcttcaaaactgacaacttaaattctgcactgtagctaccgtggcgcagcttaaggccggcaaggccatggcgctcgaataatgttacccacaagtgaacttgcgagcggccacagcccaagtgacatccggcttccctaaccgaaagtccgccttcgagtaccagttttacggcctttaaacgaatctcataattatatttcataaaaaacaccccaaaagtgtccaacttttggggtgcagtacactttcccgtccgattttcacccttgaagggactggcagtcagcggaacagcccctgccgccgcggatgccgccttacacccgcaagtgcgccttcgtgcaaaatccccgcaggcgtttcataatgccttcggttgatttcaacactgatcgccgtatcggcaatgcctttgatctgtcgctgttagccggcgaatttctccgcaaatggctgttccggcgctgttttggactttgatattcccgataaacgaatgaattcgagtcccgcctcggtattccatcgccgagtgaggagcggattgtacggccgactgcggggatgtgcaatgacaagcaaatgaatgtcttatgcaatatgcagcaaacagtagaggttacggttggagaaccgtaacctctactgtcgttgcttttttcgttagtgccgcccgatgccgcggggatttttattccatccggtgctgaatcctaccggtatttgtgcgatatgagggtcatgaactcctcgcgcgtgcggtggtccgagaggaaaatgcccgtgaacgccgacgtggtcgtcgccgactgctgtttttcgatgccgcgcatctgcatgcacatgtggctggcctcgatcaccacggccacgcccatcgggttgagcgcctcctgtatgcagtcgcggatctgcaccgtcagccgctcctgcacctgcaggcggcgggcgtagcactccacgacgcgggcgattttggaaagtcccgtgatgtgtccgttggggatgtaggcgacgtgcgccttgccgtaaaacggcagcatatggtgttcgcagagcgagtacagctcgatgtccttcacgagcaccatctgtttgtactcttcgcggaacgtcgcggagcggatgatttcgagcggattctcttcgtatcccttcgtcaggaacgccatcgccttggcgacgcgttcgggggttttcagaagtccttcgcgcgaagggtcctcccccagcagccgcaggatttcggcgtaatggagcttcagcgcctcgatggtccgggcgtcgaaacgttcctctttgttgtaagttctctcttccattggagggcaaagatagataaagtagcgtgcaaaagcaagcgtgcattttttcggaccgcgtccgtgtgccgtaaagaggccctatttcccggcggaatgcaaataggccgcgagtttgcgtacggcgcgggcgcggtgcgaaacctcgtttttctcttcggtggacatctgggcgaaggtcttgtcgtatccgtcgggtatgaacagcggatcgtacccgaagccttcgtgcccctcttcgcggtcgatgatgcgcccttcgaccacaccttcgaaaaggtgttcttcgccgttgaggatcagcgaaatgaccgttctgaactgcgcccggcggtcggtcgctccttcgaggtttttcagcagcaggcggttgttggccgcgaaatcgtgtccgtcggtggcgtaacgggccgaatgcacgcccggagcgccgcccagcgccttcacttcgagtccggtatcgtcggcgaagcagtcgagtcccgtgcggtcgttgaggtaatgcgccttctgcgaagcgttgccttcgagggtctgctgctcttcgggaatctcctccgtgacgccgcattcgcggggcgtcaccagccggaagccgggacccagcacggcctgcacctccatgagtttatgcgcgttattcgtagcgaagaggatattcactgcgtctgtttcggattgtgacatatttgttgtgtcggatggttgtatctgcgttcgcttcccggtcattttacgacctccagcttttcgagtttgtcgtcgaggtcgatcttgtcgatgatggttttgaccagcacgtccatgtccgacccttcggagtagtcggccgggcagacgtggctcacgcggttgtcgtgaatcagcgaggccatctcgcgccgcgcccccttctggtcggggttgtagacggcgatggagtggccgccggagttcttcaccagccgcatgcagggaatgtcggtcgttccgtcgcctacgtaaatcatgtgtttgaacggtatggggcgctcgttttcggggatgtagcggttcaccagcttgctgtcgaaaaccgactcgacgcctttgtttatcttgaagatgaactgcgtcttgttggtgtagttgaccgccacggcgggccagtaggcgatgccgtccacgtcgtagagaaacgagcaggcgtatattttccggaattcgtgggcgatctccgtgccttcgatgatctccttcatgcccgacgaattgatgtagtgcagaatccggatgccgcgtgcggccccgtaggcgtttatccgctcgaaccactccctgacgcctttgtaaagcgtcacgcggcggcccgactcctgaaaggcttcgcgccgcagtgacagtcctttcgatttggcctcctgaagcatgcgcgccatgtaggtcaggaccatgtcggcgtcctgctcctcggccagcgtgttggcttcggtccagaactccttgttgcttttgcctacggcggggatgaagtcgtactcctgcatgttgccgggggcgagcgtgccgtcgaaatcgtaaatcagggcgatgttgaatcggtaatccattcttcggggtgttttgaatttcaaatatacctatttttcactacttttgcaaaagcgagaccgaaaagacaaaacaaatggaattcaaagagttgatcgaaaaacgccgcagcatccgaaaattctcggaccgggcggtgccgcgcgagacggtggaccgcatcctgcgcgagacccttacggcgccttcggcgcgcaacacccggaccacgcgtctcatggtggtggacgatccggccttggtggcccgcatggccgaaatgcgcgattacgggtcggcgttcatgaagggtgcgccgctggctttcgtcgtgctgggcgatacttcgaaaagcgatctctggcgcgaaaacgccgcgatttcggccacgctgctgcagctcgcctgcgtggacgagggactcggctcctgctgggtgcatatcaacggccggccgcgccgcaaggatgaacccgacgggcagagcgcggccgattacctgcgcagtttcctgcccgtcccggcggactgcgaacccctctgcgccattgcggccggctactccgacttcacgcccgctcccctgcccgacgcggacgacgcggcgcggatcatccgcctttaaacagtttttccggctacagcagaaccacgtgtttgcgcagcatgtcgacgatctgcgtccgcaactgcagggcgttgatcggcttggccatgtagccgtcgaatccgctctggagcaccttctgttcgtcggaagcgaatgcgaacgccgtcacggcgatgatcgggacgctctctgacagtttgcgtatttcggccgtggcctcgtaaccattcatcacgggcatgttgatatccatcaatacgagatgcggacggcgctgccggtatatttcgaccgtttccaacccgttccatgcgtgcagaagcgtgtattctttgcgcaggatcgattcgaacagccggtagttgctgtcattgtcctcggcgatcagaatcaccagtttgtccttttcgaccgagatgacgggatattgctcctccgtcctttgcgccgcggcctttcccggaacatagggcaggataaaccagaattttgatcctttgccctcttcggattccacgccgatacgtccgcccagatgttcgacgatcatcttgcagatcgacagaccgagtcccgtgccctgcttgaaggtgttgagtttgacgaagcgttcgaaaacctgttccgttttgtctgcggggattccgctaccggtgtccgagacccagaaatagagttctctgccgcgcatttcgtatccgaaccggatgctgcccgtctgcgtgaacttcgcggcgttggtcagcaggttgatgatcacctgcgagagccggttgcggtcggtgcagacggagcattgttcgtatttctgctcgaagagcagttcgacgccctcccggaccttcatgcggatgacattctccttctcccgcatcagttcgttcaggtcgaagtccgtgtggatgaagtcgagcgtccccgcctcgattttcgagaggtcgaggatgtcgccgatgagctgcagcagcagggcgttgttgttttcgatgatcgagacgtattcctgcttctcctgctcctcttcggtcgaggccagaatgcccgaaaatccgacgatggcgttgagcggcgtgcgtatctcgtggctcatgttggccagaaacgccgttttcaggcggttcgactcttcggcgcggtcgcgggccgagaggagttcctgctccatgcgtttgcgttcggtgatgacctgcgacgttccgacgagcgtcttgggccgtccctgcgcgtcgaacgactccacggcggccagcgcttcgacccattccatgtgccagtgtccgctttcgttggagatcacgcggtactcttcgcagaccttgtccgtacggccggctatcaggtcgtcgtaggcctgccgtatgcggtcgcggtcctccttgtgtatcttcgagaaatagcattcgtcgcttaccgaaagcgaagcttcgttctgcaggatcgcctctccggaggcggctttgaccggtttgttgatgtcgcagaggatggtgcggttgttcaggtcgcatttccacggaacgatgttggccacgtcgagcgccagcgagagcttgtggttgatcgagtccagtttctgctgcgccttgtgcagcgcggtgccgtccagacagaagatgtcgatgtggtcggtcaggtacgagcggctcagaatcacttcgaaaaagatgtccagcggtttgtagtagaagggataggtgacggtccggttttccgtcaggacgatgttcacgagccgcaggaactcggagaacgaatcggcgaaaagttcgctcccccgtttgccgacgacctgattccggggcaggaacgtccgttcgaagtaggcgtttatgtcgctgaattccgtatcggcgggatagtgtttctcgtcgaatatgacccgttcctgaatgtagatgatcggcatccggttgaacaggttcgcatattttatctggctttccgattcccgtcggcgggccgcttcgacctttcgcatgacgcggatgcgccattgctggaagaggatgaacagcaggaagaaaccgccgcataggatgatcgccgttctgttccgctccgcgaatgtctccggtttgtcgatgaataccgaatccgggggacatatttcgggtgaaatcttgttgcgcagcatcgccggatagttgaacgtcgggtgtgcgtcggtcggggtgtagaacggaatgtcgcgcggctggcgtccctccagaatggtgttgaacgtcttgatgatctgccggttgtatacgctcacgtcgtatgtgaatccgcctaccacgccgctgtttttcaccgaagagggccatagtgcgaacagcggagccgtcgaacttgcgatgatcttgaagggattggccgttatctcggtattgccggcgatatttcttgtgtagtgccacgaggaaaagagcacgccggtatgccgggtgtcggtgacgttcagcgagtcgagcagctggtccacgctcatgttcgaagccttgtaggaggtgaaccgcattcccggataatcggtgtcgagcagtttcctcagctcgtcttcgtattgctggttgatataacggccgtcgcggacgaatacgaggcggttcatctccggaatcatgcggcgcatcagctcgatggtctgttcgaggtagatcggggcgtagagcagtgtcagattgtattccccgctcagctcccggagcggaatgcgctcggagtgcgggatggcccgcttgctgacatagtacttgtcggggccgatgaaatcctcctcggcgcagatgatcgacgggatgcctttcccccactccttttcggcgaagtcccgcatgatgaaggccggggcgccgatgtatatcagcatccggggcggattcttgccgtattcacgggagagattcgtccggaaattgtccagatccgactgctggtccatcaggagcgtgttcatatgctcgacgtatacttcgaggttttcgatctgctctatccgggcggtgatgtcggtgattatctcccatccccacgaggaagattcgttgtagctgttgattatcagtacgtaatcacgtttgtctcccggagggctgctggtggcgttggtgaaaggatgagccagcaggcatccgaaaatcatgacccatagcaacgcctgaagcgtcagtccgaacggttttttcagtaagttcatggtgtgggacgggttccgtgtgccgagcgcggggaccggatgcggagattaggggtgagacgacgcaggtttttagtgaaaagagacgcaaaaaaagaggatcggagccgtaaagacccgccgtgcggcgggtctttacggctctccgaatcatctatttgtttaaaacgggtttaatgtccttgatacgcaactgggtggttaccgtaccgcggtagtggttttcgacgatctggtagcatacgtcgatcgggcgtcccgaacgcacccattcgtagtgcgtgggctgctggaaggcgatcgactggatcttggtgttgggcttctgccgctggatgaggtccatgcgcaggtgctcgcactccacgccgaccagtttggcgtcgccgtggttgctgaccccgtacgttgcgaagaccggcgccgtattgcccggcccgaagggctggaaacggttgaggtccttgcggaatgcgggcgtgatgtccgagaagagcagttcgctgtcgatgtccacttgtggcatcagcatctgcgggtcgatattctcctcgacataggcgttgaagcgccgggtgaactcgtccacgttttcgggccgcatcgtcagtcctgcggcgtacatgtgcccgccgaagttctccagcaggtccgagcacgattcgacggcctgatagaggtcgaagcccggcaccgaacgggccgatccggtcacgaatccgttgctcatcgtcagcaccaccgtgggccggtagtaggtttcgatcagacgcgacgcgacgatgcccacgatgcccttcatccacttgggattgtagatcacggtgctcttcagctgcttcatttcggggttgcgctcgatgaagtcgtgcgcttcctgcgtgacggagcggtcgatcgacttgcggtcctgattgtaggcgtcgatgacgttgccgaactccgcggcgatgctttcgttaccctcgatcagcagctcgacggcggcgtggccgcccgaaggcgacgcattctcgtcgttctcgtccatgcgcatgcgcccggcggcgttgatgcggggaccgatcttgaagacgatgtcgtcgatggtgatgttgtgtttgtccagaccgcagatcttgatgatcgacagcaggcccttcgacggctcgcggttgaggtctttgaggccgaaatgcgccagaatgcggttttcgtccaccagcggcacgatgtccgaggcgatgctcactaccagcaggtccagcagcgggctgatctgctcgaagggaatccggtttttctgggcgtaggcctgcacgagtttgaatcccacgccgcagcccgacagttcgtcgaacgggtaggaacaatcgacccgcttggggtccagaacggctacggcgcggggaatttcctcggccgggaggtgatggtcgcagatgatgaaatccacgcccttgctctttgcatagacaatcttttccgtggctttgataccgcagtccagagcgatgataagccccacgcccttgcgggccgcgaggtcgatacctttgaccgaaatgccgtaaccttcggtataacggtcgggaatgtagaacatcaggtttttatgcccgatctggcgcaggaacttgtacaccagcgcaacggccgtgcagccgtccacgtcgtagtcgccgtaaaccatgatcttctcattgttacgaacggcctgttcgacccgctcgaccgccttgtccatatccttcatcaggaacggatcgtggaggtcggcgaggctcggtttaaagaacttgtccgccttttctacagtgtctatgcctctctgtacgagcagattcgccagcacgggggatatcctgagcacggaggcgagcttcgccaccgcctcggaatcgccctgcggtttcactacccatcgtttttctataggcatacgatttactatttatatattctaacatttaatatctcacttaaaaatttcacgacgagtcttttgacatcgtccatcgggactttggcgcccgtttccctttcgatcgaggtcgcgccccggtcggtgaatccgcaggggttgatgcgcgaaaaccactccagatcggtcgttacgttcagcgcgaacccgtgcatggtaatataacgcgacgaacggactcctattgcgcatatcttgcgcggagcgcccgccggcgtgcattttccgccgccgtccgcggtccggtgatcgccttcttgcgcgattcccgctcccacccagacgcccgaagcgcctgcgatgcgttccgcccggatgccgtattcggccacggtgcgaatgacggactcttccagcgcgtcgatgtatgccctcagcccgatgcctaacctttcgaggtccagaatcggatagcagaccagctgtccgggtccgtggaaggtgatgtcgccccctcggtctatgtgaaagaactgcgcgcccatcgcttcgagcgcttcgcggcccacgagcaggttctcggcgtggccgcttttgccgagcgtgtacaccggcggatgctccaccagcaggatcgtgcccgcctcttccgaggacggcgttgcgctctccggcgctgccgtccggttcgtttttccggctgtcagggcgtcgaacagggtctgctgcaaatcccagcaggctttgtagtccatctgtccgaggtcccggcagtaaacgttcatcgctgcaaacttttaacgcttttcagggcctcttccgccaaatacgacgagcggaccagcggcgcgctcgcgcagtaggcgaagcccatttccagcgctttgagtctgtaccattcgaatttttcaggagtgatatacgccgccacggggtaatgctccaaagttggacgaaggtactgaccgagcgttacgatcccgacgcccgcttcgcgcaggtcgtgcagggtttgtaatacttcgtcatcgctctcgccaagtccgaccatcagtccgcttttcgttgcgacgccctgccggctcatgtggcgcagggtctccagactcgtgcgatatttcgctctggaacggaccacgggggtcagccgctcgacggtttcgatgttgtgcccgattatatcgggcttcgacgcgatgaccgtgtccaagaggtcgggccgtgcgtcgagatcgggaataaggagctcaattgcggcgtcgggattctgtttgcggatggcgcggacggtttcggcccaatgtgcggcgccgccgtccggcaggtcgtcacgcgttacagaagttacgacgacatacctcagtttcatcagcgagacgctttcggctacccgccggggttcctcggcgtccggggcaaggggatgtcctgttctggtggcacagaagcggcagccccgtgtgcagatatcgcccagaatcatgaaggtcgcggttctgcggctccagcattcggccttgttgggacacatgccgctgctgcaaatcgtgtgcagcgcatgttttcggactatctgctgaacctcggcgtattccggggttcggtggagccggatcttcagccatccgggttttttcagtacgtctaccttgtcataaaacttcggcatttaagatcattattttccaattgatgcaaaaatacgaaaaaataattgatattccctaagaatggttcattttctttgacagccctgcgccggacgcttctgcgccggcatccgtccgttttcgggcttttcggggcggatcttcgaagggggaaccgctttccgccctcccgtcgtcgccgcggggagaaagcatattaaaaaataaaaaaacgcacctgccgaaactgcaataattcattatcggagccttctctccgccgcttccggacacgagaaaggggttcggtacctggcagtagcgaacccctctggttaggttagttaggttaatgagagtgggagaatcccacgttttgttatacaaagataaactgaaattcacaattcaccaaatcttttataacattttttcaaactaacctgaagaaatctgttaaattataattaaaaaatttaaaataatagccgatttataagtttttgattaaagcgcttcgcgtatttccgcgttctgcaccgtttcgggctgcttctccggggtgagcgaagtgatgtggcggttgcggtaagcggccggcgtcatctggtattcctttttgaaaagtttaataaaatgcgacgtattggggaacgtgcaggcgttgccgatctccgaaatggatttcgaggtcgagatcagcagcagacgcgagtgcatcagccgctggcggatgtaccacttgtggggcggcatctggaaatgacggcggaactccttcttgaacgaagtgagcgaacggttcgtcagtttcgaaagctcctcgatggagatgtctttgaagatatggtcgtagacgatctgttcgaaattctctttcgcggcgtccacgttgctcagcagcttgcttttgatgcagcagtcctcgtgcgaggcgatcagatagatcaattcggtcatcttgatgttctcggccgtctcgtcgcggtggaaatcttcgtcgcgcaggtcgttgttggtattgacgaaaaagttgcggatcgaattccatgcgggcatggcgacgtgcgtgcggttgcggcagttttcacacgaatgttcgttcgaaatgttcaggccgtaggtgatgttcagatgcatcaggatacgctggaggtccgccggcgtataataaaagagcacttgttcgaagggctggccgttttccgggaagttctcgatatagtgatgcccgatgccgaggtagaatacgtctccgcgtgtgagcgtctggcgcttatcgccttcgtagatgtacttcgtaccacgaagaatgtaaccgattgcatagcgcgaaagcgcctgagactggattccgttgtgaagtgcttcgacatacttcacgatcatcggctgctgagccgacgaattcaatgaattcttcatactaaatcgtattttaagtttctatgaacaataagttgcgtcacttttgttcaactccaaatatacaatttaatatttgttttataaaagaattaatacgctaaaaaggcgcattaaggcaaataggactgtttgtattacctttgtgactaaatagattattgtaatgttgcaatgtagaccgacgcggccagcagaatcaggtaaacgggcagtgcgattctgcggtctatccgcacgaaaaacaccgggaaaagcagggcggcgggaaccgccgtcagggtgaatgcttcgggggtgaccgacggggtgcagagcagggcgagagtcatcgccagtatacctgtattgaaaataaggatgaagcggggtttggttccggcggcataaatgtccgagagaaagaaaaggagcgccgtcagggcaagcgccgcgatgacgcacaacatgacgagcgacgggagcggaaggcccttaaagatccacagcggaacgcccgatacgagcgcatcggccagcgtcatgaccggagccgtaaattcgtcacccatgccccagctgacatagcaggcggtcaggaggggcagtatcagccctgcggcggcgactaccgcttcgcggaaggtacgcttgaaaagcagtatcgccagcggaaggatcagcaccagcggcgtcgcgggagcatagaccagcggcagcaatcccagatacagggacgcgcggaaaatggcgtcgaatccgtagccgttgcagtacgaacggcagtagttcttggcggcgagcgccagcagcatcgaagcggcgaatgccgtcaggtagttcccgccggagaagattccgcaggcgacgacggcgtagagcggaatcggcaggcatgtgctgacgccatagaggttgtagcggatggcgatccgccccgtgcacattcccgtgaagaggatcatgaatccggcggccagacgtgcccacaccggatatgctgcctgaaaccgggtcagcgctccgcccagcaggggcattgtctccggcgcatcggcggacacgccgtctcccgccccgccccacatggccgtgactgcgagtgcgaagagagtgacgaaggccggaaccagcggttgtcgggcgatatctatcttcatgcggcgatttctgctttcggcaaaaatacggaaaaaagctgtacgggactaaataattgctaactttgttgtagccggaatcctgcggagggtgtttcttttccagtcttgcgtatggttgcggcccgttcgcaggagcaacacggcatgtttcggctgtccggctgttcggttgttcggttgctcggctgctcggctgttcagttgctcggccgctgggcggaattggtggggcggccgctgggcggatcgacgtctccggagatgccggttgcattccggcggttctgtccggaattgggttccgactcgcttttcggaccagctttccgggcctgtttcgggatttgcttttccggtcgcaggattcgtctgtgcaatttttgccgcagcagcttccggcggcgggcgtgtaatagtttgttgccggttttccttgatttgtgtcgggtgccgatgatttaatgtttttggctatgcttgaaaattgctttcaatacgatcttcccgaagcgggatgcgacgaggccgggcgggggtgtctcgccgggccggtctttgcagcggccgtgatgctgccgcccgatttccacgaccccttgctcaacgattcgaagcagatgaccgagcgcaaccgcgagaagcttcggacgattatcgaacgcgaagccgtggcatgggccgtcgaagcggtctccgccgagcggatcgacgagatcaacattctgaatgcgtcgttcgagggaatgtcgctggccgcggcgcggctcgatcccgctcccggctttctggccatcgacggcaaccgcttccggacccggctcgaactgccttaccgctgcatcgtcaaaggcgacggcaagtatgccgacatcgccgccgcttcggtgttggccaaaacgcaccgcgacgagtacatgctgcgtctggccgaggagtttccccagtacggctggcggaagaacaaaggttatccgacgcgcgaacaccgccttgcaatccgcgagtacggtctcactccacaccaccggctgaccttcaaccacgaaatcggccagctggaattggcgttctgatccggcggcgtatcattcgtattcgaaacgccgaaatccctcttcatacggcaaaacaaaaagagctgaagtcttgacttcagctctttttcaaacaattttcctcggattttagtatcccagcgacttggaagcggcgtaggagactttcagtgcgttggcacggcgaagctcctgcttcacgtcggttacgatacccattttcgtggtctggtctgccttgagacagatcgtcatcgaagcacggtcggcctcgctgaggttatcgcgctctgcggcgacgaaatccagaatatccttggtcgttttgtacgagtcgttcagctggatacggggtgcagtgccgaatttggcctgcatcgccagcgaaggctgtccgatgtggatgtagctgacgagcgatttcttctccagcttctgcacctcggtagcctcagggagtttgtatctcacgagcagttcctgatcgcgcatggtcgtcgataccataaagaagaagaggatcatgaagatcacgtcaggaagcgatgcggtcgagatagggggcaaacctttgttgcccttctttttcattactgccatagcttacttctttatattacgcggttctgcctccgagatcttcagcggaacggcttttgatactgcgttgcggttctcttcgggaaggtcggcgaatttcgagccgaatttccgcatggcgacctcgtcgcgtacttcgttgaatgcgcgggtgagttcgttctgcaccatgatgtacgactgatagccggtatcacgggtggtctgaagcgaaacgacgccctgactttcgggatatacccacttgctgccgtcagccaattcgatttccttatcggctttttcaggaaggttttcatcatccatcggattgaggatgaattccttcgttctgtccttgagctggtgcaggtcgatgatctcctgcttgcccgcggggcctgccatgatgttgccgctgcccgaaataagcacgaggaagaggttgcgttccttgaccttgatgtcctcctgctgtttctcatcggggggcataggcgggagcatacgcaccagacctgtatcgacattcatcgtagtggccacaaggaagaaaatcagcagcaggaaggcgatgtcggccatcgagccggcattgatttcctgtattttccttttatctgttgccattgttgttcactccattatttgaaagcgccccagatttcggttactacggccgtcaggaaagcggcgacgaaagcaacgtacgtcacgagaatgctcgtttcggtaattacggtttcaccgtggccgaagaaaccattggtctggagatcgacgatgttcaccgtgtggccggcagcgtagaagtacgacacgccgacgacgatgattatcagcgccagagagaggatggttcccttgatgcctgccgggttctgaatcattccgaagatggcgcagaacagggctgcggcgacagcgaacacgaagaggaagtatccccatacgaggttcaggctgatcgcagcatccgagccgcccgtagcgatcgcgtataccagaagtaccacggtgatcgccatcagaatgcccagcaatatgttcaatatctttttcataattgctttttaactctttaaatcgttgggattatttcttgctgtatgccgtcaggatatccatcagcgtgatggacgaatcctccatatcgttcacgagcgaatcgatcttcgaaacgatatagttgtagaacagctgaagaataaccgcagcgataagacccatgagggtggtcagaagggcgaccttgataccgcctgcaacgagggtcgggctgatatcgccggcagcctgaatggcgtcgaacgccgcgatcatgccgacaacggtacccatgaagcccaacatcggcgacagagcgatgaacagaccgatccacgaaagacccgactccatctggccggtctgaaccgaaccgtaggaaacgacagccttctcgaccgaatccagaccctgatcgtagcggtcgagaccctgatagtagatcgaagcgataggaccgcgggtgttgcggcaaacttctttggcagcttcgatgccgccgttcttcagtgcgtcctcaacggcagcgatgagcttcttcgagttgatcgttgccagcgacaggtagaggatacgctcgatagcgacagccagaccgatcaccaagcagagaagaaccgggagcatccattcccaaccgccttcgaggaatttctgcatcatgatgtggtgcatgctgtcgcctgcgagtgcggtttcggcagcgactgcagtctcttcggcagcggcagcggcttcctgcgcgaaagcgttaacagtacccagtgcgaacagggccactgacagaatcaaaaaaagttttttcatagttgtgttggataaaattaaatttgattagttgtttatttgtttgtgtcttttttggtttattccatatctcggtttcccgacttcttcaatttcttatttttccctaaaaaaatcctaaaaaaatcttttttttcacgcttccggaatttatccggcgttttttggtcgctgtccgcatattttccgtaccggtttcacgcaggcagccgaatcccgaatctttcattctgaactcatgcaatttcctgccgatcaacttgttgcgatgttcgcatctttccgtccgccgtcaccgggggccttctaaggatacattagcagtgcgaaatatagaaaaaaaaatcgttccgtgcaatggcttaggccgtaaattctccgcgcagggggcggcgcagcagcgcgcgcgtccggtcgtccggcaggtcgagtcccagcacgtacatcagtttggtcacggcggcttcggtggtcatgtcgtggccgcacaggacgccgatttcctgcaggcgaagccccgtttcgtaaagttccatcgagactttgccgccgccgcactgcgtgatgttgagaatgatgatcccgcggccgatcgcctccttcagtacgcggatgaaccactcgttggtcggggcgttgcccgcgccgaaggtttcgagcaccacggctctcagtccgggcgccgagagcatggcccggaggatgttttcgcccagtcccggaaagagtttgaccacctcgattccgtcggccagccgcgtggcgatgcgcagctggggcgaaacctccgtcggatgcaggatggccgggaggttgtaggcgatgttgaccccgacctccgccagcggcggataattgtaggagcggaaggcgctcagcgcttcggcgctgcgcttggtggtgcggttggcgcggaacagccggttctggaaatagagcgacacttcgggcacttcggggcgtccgccgatgtgcgcgcccgcgatttcgatggccgtgatgaggttctcgcggccgtcggtccgcagtacgccgatcggaatctggcttccggtgaagacgaccggctttgcgaggttttcgagcatgaaactcatggccgacgcggtatacgacatggtgtcggtgccgtgcagcacgacgaatccgtcgtagcgcgcgtagttgtcgcggatcagttcggcaagtgcggcccagttggcgggcgtgacgttcgacgagtcgatcacggggtccatcgtcagtacgtcgatgtccacgttgagccgcttgagcgacgggaattcgtcgtatatggcgctgaagtcgaacggcaccaaggctccggtttcggcgtcgttcttcatgccgatcgtgccgcccgtgtagataatcaggatagaggatttcatcgtgtatgcttgtgtttttttattttccgaaaatgcgttcggcgttggccgtcgtcgcttcggccgtctcgccgggcgtcagtcctttcagctccgcgactttttcgcagacgtaccgcacataggccgattcgttgcgttcgccgcggtggggtgcgggcgtcaggtagggacagtcggtttcgaggacgatgtcgcgcagctccatctcccgcaccgcgtcggccagcttgctctttttgaacgtcaccaccccgccgatgccgaagacgaagtcgccgtactccttcagttcccggtaggtgtcggccgtgtccgaaaaggcgtggaaaacgccccggacgcctctgcccttgtattcgcgcatcagctccacggtttcgggccatgcgtcgcgcgtgtggaccgcgatcggaagaccgtactccagcgacaggtcgatctggcggcggaaggcttcgagctgttcggccctgaaatcacggctccagtagaggtccagcccgatttcgcccacggcgcagaagcggatccctgcgggcggcgtttcgagataacgctctacgagcgccagctcctcgcgccagcgtggattgtcgttcaccgacgtcgggtgcaggcccatcatcggggcgcaccgctccggatggctgcggcacaacccgaacagccgttcatggctttcggagtcgatcgccgggagcagcgctctctccactccggcgtcggccgcacgtgcgagggcctcctcgcggtccgcgtcgaattcgggggcgtacagatgcgaatgtgtatcggtaagtctcatatcagtttcatgtatctgttgccgggcagctggcgtacggcgcctgccagttccagccccacgagcagcgtcgccagctcgccgggatcgagtccgctcagttctgaaagcgtttcgtgcgacagcggatcgtccgtgcggaaacaacccagcagtcccgtttcgtcgggcgtgagctgcggtgtggcgggtttcggccggagcgtcgccggttccgcgccgagatcccacatcaattcgcggacaatgtcgtcggccgtcagcaccagctgcgctttacggttgcggatcaggtggttggtccctgccgacatgcggtccgtggcgcggcccggcacggccatcaccgaacggtcgtaatcgtcggcgcagtgcgccgtgacgagcgatccgccgctgtcaggcgattcgacgacgatacatccggcgctaagcccggcgatgatgcggttgcgggcgatataagccgtgccgttctgccgggtctgcgaatgaagttccgtgaccagtgcgccgccgtgatcgaggatgtcgcgggctacggccgtatgctgcgccggcgtcacttccggcagcgggttggccagcacggcgacggtcggcactcccgccgccaatgccgcgcggtgcgccgcgacgtcgatcccgaaagccagtccgctgacgatgcagagtcccggcacctgcgccgcgagtccctccacgagccggttgcacatggtctgtccgtagggcgtcgcattgcgcgtgccgaccatcgacagacagcgtgccgaaagggctgccgtatcaccttttatgtataggacatggggatagtcggggatttcccgcaggagcggcgggtattccggatcggtcgaggcgatggccgcgattccgttgcggcggcaatgctccagctccttttccgcggcggcgaatcctctgcggcggacgatttcgcgggcgatctcttcgcgcaggcccgcttcgcccgccagttcgtccggagccgcggcgaaaatgtcccgtgcgctgccgaacactccgagcagatgcacggcgcccttcaccccgatacccggagtcatctgaagggcgatatcctcgattgtcatagccgcaaaagtcgtttaacgtgtcgtaaaagtaaatatttttgggaaataacgcaaagttgagccgaagttttgcagattttagaaatgtttgtatatttgcactccgatacgcctgagcgtaacccggaaaacacctgagacggtggagccgggggctgaatgaaatcagcggccgcggcccgaacagcggtttgcgcaggacggatcggaaacgaaaaatggtctgatggccgagtggctaggcaaaggtctgcaaaaccttgtacagcggttcgaatccgcttcagacctcaccaaaacaccgttgtagattactacaacggtgttttatttttagcttgtcatacatcttctgacattcgcattatccgagtcttaattgaagccgtcgcggagatgcattcatgtataaataactatcgcaatctgattcattcaattctaattttgggctagttctgattttgtataatttaattcatttatatgcattttaaccatttggcgcaataaagttggtttatcggcggaattcatccgggcgttgggaaatcatgcacgcgcattggtctttcgtgtcgcctgagtagtgaacgggatgctatgtgaaaatcggcgttcggaattacccggacgccgattttgtcagccgttcttgcgcatcgacagtgcaatgcggttgcggaccgtgtcgatgcccgtcacgcggacttcgacgtgctgtcccaaatggacgacatcggccggcgatgcgacgtagcggtcggccagctgcgagatatgcaccagcccgtcctgcttgatgccgatatcgacgaacgcgccgaaggccgtgatgttggtgacgatgccgggcagcgtcatgccttcgcgcaggtcggcgaccgagtgcacgtcggggtcgaacgagaatgcctgcaactgttcgcgcgggtcgagaccccgcttgtcgagcgcttcgagaatgtccgtcacggtcggcagccccacctcggcgtccacgtatctttcgggttttatgcctttgcgcagctccttgtccgccagcagttgctcgaccgtcacgcccgcgtcggcggccatccgctccacgatatgatacgactccgggtgcacggcgctgttgtcgagcggattcctgccgcctaccacgcgcaggaatcccgccgcctgctcgtaggctttggcgcccagacgcggcactttcagcaggcttttccggtctttgaaatcgccgttcgcggcgcggtatgcgacgatgttttcggccagcgcaagccccagaccggatatgtaggtcagaatatgcttcgatgcggtgttgatgttcacgccgaccttgttcacgcagctctcgaccaccgtgaccagtctggccctgagcttggactgatcgacgctgtgctggtattgtcccacgccgatcgactttgggtcgatcttcaccagctccgacagcgggtccatcagcctgcggccgatgctgactgcgccgcgaacggtcacgtcgtgatcggggaactcttcgcgggccgcggccgacgccgagtagaccgatgcgccgtcctcgctcaccatgaacaccccgacgccctccagccccagtccgcggaccagctgttcggtctcgcgccctgccgtgccgtcgcctatggcgaaggcttcggccttgtaccgggccgccagcgaccgcagcgtttcggcggcttcggcgtaacggttctgcggcggatggggatagacggtggtgttgtgcagcaggttgccctgcgaatcgagcgccacgactttgcagcccgtgcggaatccggggtcgacggcgatgatgcgcttctgtccgagcggcgccgagagcagcagctgccgcaggttttcggcgaatacccggatcgcttcgtcgtcggccttctccttggccgccgccagcagttcggtctcgatcgagggccgtatcagacgtttgaacgagtccgcgacggcagcttccatccattcgcgcgtcgccgagccgtggcgtacgaactggcggcaaagcccttccgtaatgcggtcggcgtccatctccaccgagatcttcaggactccttcgtccatgccgcggcgcatggccagaaagcggtgcgatgaaacggtgcgcagcggcgacgtcgcatcgaagtagtccgaatatttgaccccttcctgctccttgcctttcacgagccgggagtgaactgcgccttcgcgggccgccgtgcggcgtacgctgttgcgggcgcgctcgtcctccgacacccgctcggcgatgatgtcgcacgccccggctatcgcctcctccggagtcggtacgtcggccgtgacgaaacgctgcgcctgccgtgcgatgtcgtgcgaattttgcgccatgatgctgtttgccagcggctccagcccgcgttcgcgcgctacggtcgcccgtgtccgccgcttgggcttgtaaggcaggtaaatatcctccagctctacggcttcccagcacgcttcgatgcgtttgcgaagttcgtcggtcagtttgccctgctccccgatcgtcgagaggacggtctgtttgcgtgcttcgagttcggtgagtttgtccagctgctccttgacggccccgacctgcagttcgtcgagcgaaccggtcgcctccttgcggtagcggctgataaagggtatcgtcgcgccgtcgcgcagcaggcgtaccgtgccctgcacctgccggagggcgattccgagtctttgtgctatgatttgttcggtcattgtcggtgtgtgtcgatcggcaaagataggaaattgtcgcgatttcggaagccggaaccgccgccggattcgctttttcgcccgctcctcccccggaatgcggatcagtacccgaacttcgcggccgccagctgcatgcggccgacgatatcgactccgaagggacagttgctctggcagcggccgcaggcgatgcactccgaagcgtggtgcgccagcaggttgtaatgttcgcgcacggtttcgggcacttcgtcctgcgccagcgtcagattgtagtatttgttcacgcttgcgatgtcgatccccgccgtgcagggggcgcagtggccgcagtacatgcagtgtccttcccacgagaaccggccgagtcctgtcagcgcctgcgtgtagtcgcgctgggcggctgtcgccgtacaccatgcgagcgccgcctcgatttcggtccggctgcggcatccggccatcacggccgccacgccggggcgcgtcagggcgtattcgatgcactgcaccggtgtcatcggcttcccgaacggcgagttggtcccgctcagcaggtccccgccgccgtacgccttcatcacgtcgatcgccacgccttcgcgttcgcagaattcgtagagccgctggcgttcggggtcgatgttgtgcagctcctgcgcatagctttcgtcggcccagagcgtgtccacgtcgtcgctcggcggcagcaggtcgtaacaggggttgagcgagaacatcagcacgtcgatcagtccggttcccgcggcctgccgcgctacggcggggttgtggctgctgatgccgatatggcgcaggcgcccctccgaccggagccgcagtgccagttgcaggatcggcccgtccaataccttccgcaggtcgtcctcggcatcgacgtagtggatcatgcctatatcgacgtaatccgtccccagccgcgcgagcaggtcgtcgaatgcggcctgcgccttctccggatcgcgcgtgcggagatactgcccctcttcccacaccgagcagaggtgcccctgtatgacgaacccttcgcgccgcccggccagtgccgcgccgatgctgctgcgcagttcggggttcgaagcgtagaggtcgaggaagttgatcccgttttcgattgcgaagtcgaagtctgcccgcacctcttcctccggccggttcataaatccctcgcagcccagcgccacggcgctgacgcgcagtcccgtgcggcccagtgtcctgtactccatgctatttcagttccacgagtcggtactgctgcgaacccagccctatggcttcggcgtgttcgagcgtgtgaatgccgtggcgcgactccatgcgctcgatcaggtgcgatttccccggatcgggcgatgcgtataccatgtcgacgcacgccttgtccagcgctacgggatcgagcgaggcgaggatgccgatgtcgcccatcttcggctcttcgggatgcgcgtcgcagtcgcagtccaccgagaggttgttcatcacgctgatgtagagaatcctgtcgccgcagtggtcggcgaccgacttggccgactcggccatcgactccagaaagtcgtcctgcgccgggaggtcgctccacatttcggcggcgtttttggtcttgcccgccgagtgtatccacgctttcccggccgacgatgcgatgccgatcgagatgttcttgaccgcaccgccgaagccgcccatcgcatgccccttgaagtgcgacagcaccaccgtgaagtcgtagcgggggtagtgcgagccgacgaagttctctttcaggtgtcttccgcctttcaccggcaggctcacctctccgtcggcgtccatgatgtccaccggggcgatggccgtgaaaccgtggtcggcggcggccttcaggtgcgcttccgtgtgtgcgcgtccgccgccgtaggcggtgttgcactcgacgatcgtgccgccgactttggtcacgatctcctttatcagctccggtttgaggtaattgtgcccgtccggttcgcccgtcgagagcttgacggcgacctttcccgtcgcgggacgttcctgcgcttcgtagatgcgcaccatgtttcggggtgtgatctcgcggatgaagtatacttcgggggcttcggtcttttcgccgccctgagccgatccgcaagccgtcaaaggcaggaccgacagcagtatgatcacatacattctattgatcatgtcgattggatttatttgcgtaacagatagttgataatcaggtaaccgcccgccgcctgcgcgagcatgccgggaatcccgatgcggaaatcctgcacggcggcggccgccgaacccgtgaaggcccattctcccagcgtacccgccgtctggtagaagagcaccacgcccgccagcagcggcagcgtcgcgcggccgaaccgccgtgcggcgaatccggcggctgcggccagcagtacggacttgagcagaatcgccggcaatgccgccgcggcgggcattccgaacagcgcggagttgaccagcggcgacagcacggcggtcagcaggcccacgcgccagccgtatttgtaggctccgacgagcgtgaagaagtagatcggcagccaccgcaggccgccctgcggcaccaaatgacagatttggggcaggacgatgttgcctgcgacgaagagcgccgctgcgaggtaggttttcgcatcgcggtaatcgagcgaatagagttttacagccgttgtttccattttgtcttttgtttgttcatattcaaaaacagtgcttttcgtgcggtttttaaaaatcgaggttcacactcccgaagagcgtcgtccggggcgtcgggttccggcgtcgatcccgtcgctgcgccagcggaaaatccctgtgccgggcagtagcgaaccctatctattcgtttcgctcctgcattttgcggatgaatccttcgatcagcggcagacactccccggccgtctgcgcctcggcgcagagccgctccacgggacatatcccgtcgtccgcacggttgatgatatggggcacggcgaccgtgtaggcgactgcttttcccgcggcggcgaacaggtcgagggccgcacggctcaccacgtcggcgaaaagctcctccacgccgcccagaatcatcagcgccgccgcgcctttgccgaccaccttgtcggccacgaaagccccgtcgagcagctgcggctcctcgcgcagcagcctgtagaggtccttcacgccccgttcgcggaaaatccgcacttcgtccccgttgcggacgacgcacgaacacttctcggcgaacagcagtccgaccgtctgctccttctgttccttcgtcatagcgtatgccgttttttcgggtccgcaccgctttttgcggtccgcccgtaattccacattgcaaagatattcgatttcgcgttattgccggctaccccgattacggttcgtcataccatttttacggaatcgtacgccggcggccgcagaaggggtgttttttccgcccgcttctgccgtccgatcccgcttctgccgtccgatcccgtttctgccgtccggtttcgctttcgccatccggtcccgtccccgccgttttttcccgcttgtgccgtccgcttctccggccctttgccgggcgacgaaaaagcctgcggccataacagggccgcaggctttccggagcaggcgcttctccccttcggggagcgctattcggcttcgagcacgaatacggcgctgtcgtaaattttgttcagattggggttgatgcccgcatggttgaggtattcgccggtgaaggtgccgccgtcgaaccagaaccgtttcttatcgacgttctgctccctgatcttgtagcgggtctgcgcgtcgagtccgtaaagccggtatttcggaaccagcgtgcggctctggtagagggtgcagtaggtgaacagcacggcttttttcttgtctttcgatacgtacatcaccccgtagtagcccgtatcgtcgtaaggcgtgccgatgcggtagaggtcgccctccatgacgatgtcgcggtatcccttgtagctttcgatggctttgcgcgcgaaggccttctcctcggcgttcatctgcttgggctgcaactccatgcccagacggcccgcgcaggccatgtcgaagcggaatttgatcggcgtgatgttgctggtctggtggttgggcgtggccgagacgtgcgagcccatgaccgtcgccgggtagaacaggctggtgccgtactggatgcgggcgcgcgaaagcgcttcggtgttgtcgctggtccacacctcgttgaagtacttcatcgcgccgtactccacgcggccgccgcccgaagcgcaggcttggatcagcacgtcgggatatttggcgcggatgcgctccatgaccttgtagaatccctgcacatagtcgatccagaagtgcgactgcctgtctttgggcaggaattccgatccggcgttctccgcatggcggttggcgtcccatttgatgtagtcgatgttgggcgagagcttcatcgtgttgtcgaataccgagaatacgaagtcctgcaccttggggttggtcaggtccagcagccactggttgcgcatccggggcatttcgcggtcgcccgacctgacgatccagtcaggatgtttctcggccagttcgctcttggggttgaccatctccggctcgatccagatgccgaatttcagccctttgcggtgtgcgtgcgaagcgatgtagtcgatgccttcggggagtttttttgcgttgatctgccagtcgccgagtccggcgttcgcatcgttgcgcggatatttgttgccgaaccatccgtcgtccagcacgaacatttccagtcccatgtccgccgcgtcgtcgatcatgtccgtcagggtcttggcgtcgaacgtgaagtaggcgccctcccagctgttgagcagcgtcggggcgtacgtatggccgtgccatacgccgtagttgcgcgcccagtcgtgcaggctgcggctcgcgccgcctgcgccctcgaagctgtaggtgtagaccatttcgggcgtggtgaacgattcgcccttggcgagcgtgtaatccgaagcgtaggggttgactcccgcgaggatgttgagcacgttgaattcatcgacctcgaagttgagccggaagttgccgctccatgccagcgcgccggcgatcacctcgccgtagttctcgtcgaaggcttcgctgtcgagcgtgaccatgaaggccgggttctcggtgtgcgtcgtgcgcaccagcttgcgcgactcgatgctcttcgagccgtgggtgagcagcgtgtggtcggtctggctctcgcgcgcccatgagccgtagaggtgggtcagcaggtagctgcgcgcctttacgggcagcgacgacgaatagaaggcgtgcagtacggcgtcgcccttttcgcggttgcggatcacggtgtgggtcgtgatgacgttctctttggcataggccgtatagaccagttcgacgtccagcgcctgattggtgtcggtgagtttgacgaccgtttcgctgacgttcttgtcggccagcgtgcgcgtggcgtgcgacacgtaacgcagttcggtgttcatgtccccgtcggcgtgggtcacgcgcagcgcgggttcgcggaagttgcggccgcccatcgtcgagtaggcgaggttgtcggtgccgtggtccgtgcggcggtagcttttgatgcctgcggcgggcgatgcgtcgtcgatgcgtcctccgaagtggtggaacagcacttcgccgttcggagcgacgctcatgaccatcgaaaggtcgttggtccggatgttgatgacctgcggttcggcggccttggcgccggtgcagaccatgcccgcgaacagggccgtgaagagcggtttcagcagttttttcataggtttgagtcggttacgtttaggataatgcgtgcacacgcgtacagcgcattttcgttgtgtggggataaagttacgaaaaaaattgcgttgcggtcaaaaaaccgccgcataatctttcgttgtgaaacttccggcccgaccggaactcttccgctgtttcgtatcgaatttcaatggtccgccgtgcacggcctgcgcggttccggttccgccgggcaatgaaaaatccctgcacggagacgtgcagggatcgtttcaggacgggacctctcctacttggtcaggtattttccctgttttttgagggcgttgtaaaccgaacctgcccagtagttgcgcaggccgaagccgccgggcttgccgaccatgtccatctgggtgattatctcgtgcgtcgcgggatcgaacagcactgcggtgtagtagcccagaccgttgcccttgtcgagcgtcgtggcgaccagcaccagccccttgttgcccgaaccgttgtcgtagcgggcgacgatctgcggcagctgcgtctgccagtcggttgctgcgctgcggggcgtgaactgctctgcggccagtgcgccgagcgattcgttggcctgctctacgccggtcgagaggatgtcgatgccggtgaaccctgccacgtcgtatttcttcggttcgctcaggaagagcctgttgatggcttcgaacgccttgatgaaggcgcccggttcctcgtcggcgcctttgacgttgacgcagctgtaatccacgccgtagaaatcggctgcgatcttctcttttcccttctgggcgtagccgctgactgcgacgaggcacaatgccatggccagtaactttttcattgtcggattttttatttggtttgttcgcgtaaatctacgaatttaatttgtttccggctaatctggggcatctgttttttcgcaatgtactccacgggttcgaaaaccacctccggggcgacgcgcactttcgagcggaacgtgtcctttatctccttttcgaaagcttcgtcgcggcgcgcgctgccgatgcgcagcacgatctggtcggtgcccagactgcccgtgaagacctcgatgatgtagttgctcacgcccggaatgttctccagtatgtcgtacagcgcgggcggatagagcgtcgtgcccttgaacttgatcatctgcccctttcggccgatgaccgacgaaagccgcatcgtgccgcgtccgcaggcgcaccgctccgtgtatccgatgcagatgtcgcccgtgcggaagcgcagcagcggcatgccccgcacgccgagcgtcgtaatgacgacctctccctcctcgccttcggcgacggggttgttctgctcgtcgagcagctccaccagaatcaggtcggccggcacgtggccgccgcaatggtgcccgcactcggtgatcgaggtctgcatctcggtcgaagcgtaggtcgagaagagctccagttcaggccacagctcggtaatcttggcccccagcgtgttgttgccgaaggcggtgtcgcgcagcgcttcgccgatgcagatcgcacggcgcagcgacgagcggcggtagtcgatgccgtgctcctcggcataggcgaccagttttgtcaggaacgacggcacgacgatgcagcccgtggggccgatgcgccgtatggtgtcccactgcagttcgggaatgccgttcccgacgcggatcacgccgcaccggagcttccgcgcgcccagaaaataggccagccccgccatgaagcggcggtcgatggtggtcatcagctgcagcacgtcctccggcgtgcatcccgccgtggtgaaggattcggcttcgttgtaggccagccggtcgaggtcctcctccgtgagggcgaacgtcaccgggtcgccgagcgttcccgaagtggtcacgtagtcgatgatgcggctgcggggtacgcagatgaaatcctgcgggtggagctgcaggtcggtcttggtggtcaccggcagccgccgcaggtcctcctgcgtgcggatgtcgcccggacgcgcgccgcagtggtcgaacatgcgccggtagtagggtgaattttcgtacagataggcgatctcttcgcgcaggcgttcctgctggaacgcggcgatcgcatccgccgatgcgaattgtatttccggatttcttatcatggcttacattccgattttagtctttcaaccgcttcccgctcgtcggtgcgcgggattccgctctgcagcgccttgtcgaagcattgcgccgcccggaggtcgtcgccctgcgagcggtagtattctcccagcagtttccatgtgtggaaattctgcggattggtccgttcgaaacggtcgagcgtcgcggcgtcggcggcggtctcttcccgcatggctttgcggatttctccgcccagccgcctgtataccaccacgcgcggatagtcgtgcgcgaggtaggccgtgtcggcggctatctcctgcgccgcgtcgcaaagctctgcggccggatcgggatcgcgcatgacggctcccagatcgtagcagatataggcgccgccctgccacggcgaggtcgaaacccacattttcaacgccgagggccggaatacgaccgagtggtgggcgatcgactggttgaccgagcagtcgtttccgacgccgatgtccgcgccgccttcgccccgctggtcgcgcagcatggccacggccgcctgaggtgtgagcggcgcgtttgccgccgtcagctcctccagccgtgcgaagcggcaggggctgtccgtccgggcgaggttttcgaggttgtattcgtcgccggccagttcggtcgactggtaatggttcgtgcagacgaggtattcgccgccgctttcgtacagggcggtcttgcggggcgtcttctcgatgattgcggcccttccgtcgcgcgccgatgcgacgagcagcgattcgctgacgaaggtgtcgcggcggcgggcgatttcgagggcttcgccgatcgtggccgcatgctgcaggatttcgcgcgcgaggatcgaaatcggggtcgccgccgagagcggaacgggacctttggcggcgttgatcgtcacggtcagccccttgtcgttcatgcccgacagtacgccgatcatcccggcccagccgatgctgacgaaagggtgcccggcctgcggacggcagaaggtgacgattttgtggcgggcgaagtcgtcgcccatgtagaagtcgaaattgcggccgaccaccagctccccgtcggcgctcatgccgccccatgccgcgaacgaactgcacccgacgagcatgtactggctcatggcgtgcccgatgtcgtgcgccgcatggtagttgagctgacgctcgtaaggggtgcctatggcgtcgaagtcgtgcgagcagtagagcgaccgggcgtatatctcgcgccggtactcttcggggacgtgccgtcccagattgcggttgaagatcacgatcaggccccgcaggaacttcaggtaaccgtccgaagggatgaattcgcggatctggtccacgaaaacctgctcctgatagcgcatcagcccggccgtgagcgctccagccgccgctcccgactcttcgggcgacccggccgtgtaaagctcccagagaccgtatctgttatggcgcaggaaacttccgcggcacgaggtgtagccgccgtggtccgcgacgcggtaggccgccgtgtctacggtcatcgcgggcggctccatgtcggccgtgaggtagagtccccagaggaacgccgccgccagcagcggaagcgcaaggagcgtgatgagcgtgtatttgagaaatcgtttcatgcgtcgcctatttttttagccagatattccgtgcccagcagctcggcgcaggtcgccgccgccgagagcgttaccccgatcgcgccgtgaaccgtcaggttctgccccgtgagcagcaggttttcgaatttcgtccgtacgggaatgcaggtcgccatgacgttgcggcagtctttctgcaggccgtaggcagccccgtgggggattccggtgtaatgccggtaggtgaggggcgtggccgcgtacgtctgttcgatcgccgcccgcaggccgggcagccgctcgcagacgaagtccgtcagatgctccgcgacggccgttttcagggccgtatacgcttcgggacggcggcccggcgccgatccgctccatgccgaccagatgtcggtggcgatcggggccatcagcgtcaccacttcgctccatgccggatcggcgcacggcggctgcgcgctgaacaataccattttcggacgcatggcctccgtgtcgaagagcgtatcccagacgtctccgccctcggcgtaataatagaggttgcggttgatatagggaaaactttgcggccggagcagcagatacaccgagaaaaggccgtacgtgcccggcatggcggccatccggtcgcggaatgccgggcgcagaaccggcgtcggcccgatcaggccgaacgtcgccgcgggatggatggccgaaatgacgctcttcgcccgcagtatcctgccgtcggcgagttccacgcccgtgatgcgcctgccttcggtatggagcgcgcttgcccggcatccggtgaggatcgtaccgccgtgctcgcggattctggccgccagcgcgtcggcgatatgctgcgtcccgccggcgaaacggcaggcgccttcgatgttcgaatggtttatcatggcgtggtggtagagcggcgaacgctcccgaaccccgccgtagagggggttggtcccggccagaacgctgcgcagcagcgggtcggcgacgcattcgccgatgaactccgccgccgatgcaccgaggtatttcaccccgccggacgacagccgtcccgaacggtgcacttcaacgcctatgctgtctcctatctccctgattttgtcgcagtagcgggcgattcccgccgcttcgcgcgggaagagggaggtcaggtgccgccggaattcgtcgtagccgtgcatgtaggcgaactctccggctccgcccggcgatacgatgtcgaacgcttcgtcgagcggccgtatttcgagcgaatccccgatgccgaaatagtcgaaatagcggcgcatgatgccgccctgctgcatgctgcccacgtagtgcatccccgtgtcgatggaatggccgcggcggcggaacgactgcaggcagccgccggggaccgccgcctgttcgactatgcagacgcccatcccttcgcggctcagcatgacgccgcattccagtccgcccagcccgctgccgatgacgattatgtcgaactcctcctgcatcttattccggtcgggtcagtatgtaaaccgtattcgacgtgtgcgcgtccgtgtgcgccgcgtggatctccagccccagcctgcgggccgtctgctgcagttccggcgtcgaggtgaagtgcagctcgccgtcggtcttgttgaatccgacgatcttcgtggaccacacttcggtcatggccgtcgtcttgtgccgttcggccttccccgcgtcgccgtcgcggatgatgatccgcccgcccgccttgagccgcgccgcacagcgttcgatcagcccgcgctgctcttcgggctgcatgtagtgcagtacgtcgagcagcaggaacgcatcggcttcgggcagctccgccgtgcgcaggtcggcgtggacgaactccgtttcgggccgccgcaggaagctgtgccgcgccgtttcgatcttctccgcgtcgtaatccacgcccacgatgcggcggcggtccgagagcatggcgagcatgtagctcagcggtccgtatccgcagccgaggtccacgacggtcccttcgcgcggcacgatgcggtcgaagagcgtgtagcacttctccagccgtatcttgacccgcatgtaccactccagcacggggcctttgtaggtgtagcttttgatgagcatgtcgcggaaataggggttgcagggccggttgtaggtctcgtagagtttgcggtactcgcggcgcatctggcggcatgcggacttggcctgcgcggagtagtccgcggggtcgccgcaggccgtgcgcggcaggatgcggctcacgaccagtccgtgcttgatgtagatgggctggcgtttggacgagatcatgccgttgccgtagagacatatcggcaggatgtccagtcctaactccgccgcgaggtagaaggcgcccttgtggaaacgcttgatcctgccgtcggccgagcgcgtgccttcggggaagacgatgacgctgtaaccctctgcgaccttctgcgcgagcgcgggagcgaggcgttcgtacccgtctgcggcgtggtagaagcccagatagcggacgatgcgcccgaagaccggcgaacgccacacccagccgttggtcaccatcaccgccttggggcagatgctcagcagtacgaggatgtcgatgaacgactggtggttggcgatcaccaccgccggttcggcgaacgtttcgcccgtgtcgttcaggcgtatggttttggtggtgaccatcgcccgcaggaatccccgcgtcatatggtggatcgaccactgcacgatgcgctgcttgcgtcgtcgcgccatcggcagcggccagagcgtgaagatcagcgcctgcagcagctggcatcccgtcacgaacagcccgaatgcgtagagggtgttgatgaggctgcccagcgtgtagggcgcgccgcctttttcggtctgcgacgagacgagcatccggaacagcacgggctgtacggtgtaggataccagcaccacggcgacgatgccgaagagcgagatcagtgccagcgaatggagcgccggatgccgcgcgaagatcagcgctccgagtcccacgacgaccgtgaaggccgagaagaagatggccgtcttgtgcgtgtcgagcatcctgcgcccggttttgtattcgctcagcagtccgtccatgatgaagatgctgaagtcgtcgccgatgccgaatatgaaggtcgagaggatgatcgtcacgatgttgaactcgatgcccagcatggccatcagtccgaggatgatgacccacccgacggccatcggcagcagcgacatgagcgtcagttcgatccggccgtagcagaggaacagcgccgcggtgaccagtatcgacgagatcgagagtatcaggtagaagttgcggttcacgctccgcgccattttcccggcgtagaacgcccggtcggcggctacgatgtcgtccgtcgccgagaacgccgcgtatacctcgtgcttgcagctgtcagccagcgtcacatggctcaggaagatgggagacttctcctgtccgtcgatccactcgcggaatacctcgcgcgccgccgcggacgcgtagtcgagcggggcgtactccttttcggccagcttcagtgcgccgtcgaacgcgccgtcggcgaaaccgtagcgtttttccgcctctcgaatccccgcgcgcaccgcttcccgccgctgcggagtccagaaccggcgccaccgctccagccgccgctgctgttcggcgctgtccaccacgaacgatgcgatgccggcgtgggagtcgattttcccggcctgtttgagcgagtcgagccgccggcccatgcgcaggtagctcgcgacggcttcgcccggcgtgtcggccgtggtaatgaagagcaccttcgaccgttcgccgtcttcgtcggtcagcctgctcagccgctgctgcgcggcggccagccggggcgggtcgtagttcaggtgcatcatgtcgctgtcgaagccgatgcggttgaagaagaagagacatatgaacgtgagcagcaggatcgccgccaccagcgggcggttccggtcgggacgcattcccgtgagccgttccacccgttccagcacggcggacccccccccgcgtttctccttacggatcaggtggggaagcagcaccagactgaaaagcgtcgttccgaccagcgtcagcgatgcgaacagcccgaagtcgcgcagcagctgcgaatcggtgaagagcagtcccgcgaaggcgccgatggtcgttatgctgccgatggtcagcggataggccagatcgcggatgatctgccgcgggtcgtggcagtggttcgcatggcagagtatgtggatcgaatagctcagcgcgatgcccattacgacggtccccgcacctacggcgatcgacgaaatcgtatggcacgtcagcgacatgagcgccagcgcgaacagcgcgccgcccgccacgggaatcagggccagcaggaccgcgaacttgttgcggaacgagagggtgatgaacgccacgatgatcaggatggcgacgttgagcgtcagcatcatgtcgcgcttgatctggcgggcgttgtaggccgccacggcgggtccgccgtaatagtccgccgtgattcctgcggcggcgtattcggcgttcagctcctccagcgccgactcgatccgctcgatcagccggtcgccgacgcccgtgtcgccgctctggtagttcggtgatatgaagaccagcagcgtggtcatgtccttcgagaagaggtagtcgtcgcagagcgtgtagttgcctccgatgttcagctcctgcagcttgcccagcgcgccgaacgacagccccagcggatcgtcgtagatatattcgtcgataaatcccccgacgggcgacagcaggcggcggtagttgccctccatcgcctgcgcgatgccccgcggggtgacgagcgtgtccatgcgggcgtaatccgcttccgaaagcagcagcggcaggttgccctgcaggaacgaccgcatgccgtccgccagttcgctgccgaaggtcgcttcgacttcggcataacgcctgaaaagcgtgtcggcgttgagccgcgccgccagcgaatcggcgcaggccatcatctcgtcggtcttgtcggccgcatcctcgccggcatttatcatcacggcgatcttgtccttgatcttcaggttcgagaacgccgcggccgccttccgctccccgtcggggaagaatccggtgatgttctcgctgaaccgcagccgcagtgcggctgaggccatcgccacgaccagcactcccagcagcgcatagagcagcgtgcggcgggattcgaagaagtcgtacagggcgatgaagaacttattcatggcggggcgtgcgtttacagaagacgagcagggcgtagctgaccgccgcggccgcgaccgcgcatacggcggccatgacgaaactgcccacgacgtactggaacatgtcggcggcggccctttcgagcgtgatgtccgacagcgacagcggcattgcgcgccgcagtacctgcgcgccggtccagtagctgccgtagaggatgaaggggatcatcggcgggatgctgatgttcgagctgagtatcgccacggccttgttgagccgtgtgaagtgggccgtaacccccgccgcgatcatttggtagccccacagcggggcgatgccgaagaagatccccagcccgatcgaagcggccagctgcggattcgaatcccgcgaacgggtgatgttgtccgccacgaaacgccggatattctctttggtgagcgagcgcaggaaccgccacggatagtagaacagcagggcgcccagcacgaggaacgtgttgaggatgctgatgcgcgtgaaatccttgcccggccggaagtgcgttacgcgttcgtccttttcggggtagaagacgttgacggggatgttgcgcacggcgattccccgccatgcggcccgcaccagcacctcgacttcgaattcgtagcggcgcgtcaggaaccgcatgccctccatccgccgtacgggatagagccggaatcccgactgggtgtcgtcgagccgcatgccggtctcgacgcggaaccagaagttcgagaatttgttggcgaaggtgttcttgcccggcatgttgtccgagcggaggttccgggcgcctaccagcagcgcgtcgggcgtcttttcgatctcttcgacgaacttcgggatgtccgacgcgaagtgctgtccgtccgagtcgatcgttatcatgtagcggtagccgtgttcttcggcatagcgcagtgcccggcgtatggcgtaccctttgccgcggttcggggcgtaggagatggtcccgacgccctcggcggccagtatctgcgccgtcgaatcggtcgagccgtcgtttacgaccagcacgtgcgcgcagtagcggcgcacgtcggcgatcacgcgggcgacggttttttcgttgttgtaggtcgggatcaccgccagtatgtcgttccggtcgttcatggtttgggggtggcggtcgccttgagtttgaggaccgttttttcgttgttcgtgacgacgcaggtcacttttttcgccgccgtgccgtcgtctgcgaggcggatgtctatgtcgagcagagtgtccgcctgcggaacgatcatgccgaggaacttgcattcgcggatcgccgtgaagcggtgcctgcgtcccgtgccgcgctccagacactcccggacgatctgcagcgtgcagacgcccggcagcacggggttgccggggaagtgccctgcgtagaccggatgcgccgcatcgagccggacccggaacgcgagccggtcctctgccgagaggtagttgtctatgtcgctgaagagtttctgcatctgagtcgggatcggaggtcaggggttgaatttcgcgggatcgaccgcgaggttgaatcgtttgtcgcggaactcgtagaccgaatgtccgccttcggtttcgttcagctccatccggtcgagcgtcatgttctccaagtcgaagcggagcgtgatcgagtcgatgtatttgcgggcgcggcgcgacaggggtaccatccgtacggtccccgcgccctccgtttcgtcgtagccgatctgccacccctcgccgaactgcgagaggtcgcccgtcatgctggcgcggatcatcagcgcgacctgctgcagcatgggattggccgaggtggccgtttcggtcacctgcccggcggtcctgaggatgatgcggtcgtcgcggatgatgactttgtcgcccgcaggcacggtgtattcgagcgccatggctttggtgttgtcgtagtagaaacggccttttagctcgatttcgcccttcatccggcgcacctgccggtgctgcgtgaagtcgcactgaatggtcttgttatcgcggctggcttgggcgagccgctcccggaacgagtcgggcagctgtccttgggccgtcagcgccgacagcagcgcaaagggaattagcagggaggctattttcatggtttttcgattttaaacagttcgcatacggtcgccgtgccgtagccgcgccgcttcaggtcgtcgagaaccagccttagcagccgatccgcgccgggacggtcgtcgtgcagcaggatcaccttgccgtcgcccagccggcgggctatgcgctccgccacggcttcgcggctgcggcgcagaagcgtgtcgaacgagcggacgctccacccgatgcagcggctctgcgtccgcttcacggcccgcgccaccatcgggttggtgaccccgaacggcggccggaaaaggtgcgtctccacgccggcgatctgccggagcgactccctgcaccgcaggatgtcggccgtcatcgcccagctgctccgcatcgggaacccggctgcgtgctcccaagtgtgtatgcctgtatcgtgcccttcggcggcgatgcggcgcaccagttccggatgccgctcggcctttgcgccgacgaggaagaacgtcgcccttacgcccctctcccggagcaggtccagcacgcggggcgtcatctccgggtccggtccgtcgtcgaacgtcagcgcgacgacccgtcccgcggcccggttgcggcacagcgtgcggacgtacgcccccagccgtatctggtaggagcagtagaacaggacgaatcccgcggcgattatgacggcggctacatacatgtcagttccatggccgattcggtgcggcccgaaaagtcgttgtaaagcgtgatcttatgcccggcgttctccgcgaccgcctgccggaatacctcggcgatcgctgtaaagtgcggcttgacgccagtttgcgaagcccgtatcgcccggccttcggacgtttccgcgccggattccccgacgcaggcgttttcgtttccgtatgcctttccggaggggttttcggtatggtccttttccctgccgctctctctttcgtatctcttttcgcaggtcgctcttgcgtatgcttttccgccggcttcgccttcgtgtgcttttccgtcggggtctctttcgtatgcctttccggagggggcttcggcgcgggacttctcttctccgcccgtctctccgtttgtttctccgcccgccggatatccgccgtccgccgccggagtcccggccgggatgcggattcccgtgatttcggcgaccgaacagtcgaaccgctcggccgtcagcacgaagaataccgacgattcgccccatctcccctcctgcgcgacgcggagccgctgcagaaccttttcgaccgagggcgtcgtctcgtcgaatgcgccgaccagcacggcctgcgaccagcccgcgccgatgcgcagtgcggcgtccgtaagcgcgttctcgaaactcgtccagcggtggacgtaggtggtgttgtaacagtgcagtccgcgcagcagggcgatctgcgcgccgaccgtgttgaaggtcgactggatgaacggtgtggggttgagcatcgtctcatcgcctgcgatcagcccgtcgaggaatttctcgctgtcagcgatgcatcccagtcccgtcgcggtgattatcgcgtcgatcggcgcccgtgcgccgaattccagcagcgattcgatgccggcggccacgcccgacttcacgacgcggctcatccgccgccgcagattcatttcgggaatcagaaccttgatgtcgctgcgcagctccgcgcccgatgttatgcaattgacgtataccttcattttgcgaatatcagtgaggaacagtttccgccgaacccgaacgaattggacagcaccgaatttacggctgcggattccgtctccgcgacgggccgcagccccagctccggaatcggctccgcgaatccgggattgccgtagcgcagtccgtgtccaatggccagcgccgatagcacggcttcgatgccgccggccgcggccagcgcgtgcccggtgaagcccttcgtcgaactgaacggcggcacctgctcgccgaacagccgccgcagggcgatgccttcggtcaggtcgttgttcggcgtcgccgtgccgtgtgcgttgatgtagtccacgcgctccagcccgctccgggccagcgcttcggccatggcgcggtacgccccctcgcccgtctcggacgaagcggtctggtggtgggcgtcgttggcgttggcgtaccccgcaaggcggcagtaggagcgcatgctcggttcttcgcgcgcaaggacgacatatcccgccccttcgcccagattcagccctgcgcgcgtggcgtcgaacgggcggcaccgctccgggtcgagaatcgagagcgagttgaatccgttgagcgtgaagcggcacagtgcgtcggtgcctccggccacgacataatcggccatgtcgttttcgagcagcaaggctccggtgatgacggcgttcgcggccgacgaacaggccgtgctgacggtcgccgtgtaacccgtgatgccgcagtactccgcgatccggcgggtgctgtcggcgcagtcgtgccccgccactgagcgcaggcggcctctgccgttgtccgacctgaagtcgcggtagaagttctccgtgaggtccatgccgccgaccgaagtccccgaaacgagtgccacgcgcgccgcggcgggaatcgccgcatcggccacggcctgcgccgcggcgatcatccccagcagggccgtgcgcgaaggggtctcacgcgccgggatgccgagcagttcgccgagcgcccggttgtcgcgcaggacctctccgacgggcacgtcgacggccgaacggaaaagcgtcggcttcccgatcccgctgcgtccggcccgcagggccgccagcgtctccccggccccgttgccgagtgccgagatgatccctatgccccggacggctatgttcatttgcggtttttacggatatagtcggccagcgtggcgaccgagtggaatatcggtttggcttcggccgggttggccagccggatgccataatgtttttcgagcaggagcgtgatttcgagggcgtcgatcgaatccagtccgagtccttcgccgaacagcggcgcgtcggtggcgatctcttcggcgttgatctcctccagattcagcgcttcgataatctgctgtttgagttgcagttccagattttccatcgtatctattcgagtttttcggttaatgtcagttcacagtcgtattccccgccgcagagttcgcaccagccccacacgacggcgtccatgcgtccttgggcgatcagtccggcggagtattcccggataaagttacagcttttgtcggggaacgcaaaaaaagtgctctcgcctttcagcccgtgcttgatcgcgatctgccccagcatgatgttcgggagcgtgtagacgaacaccgccggagaggccccgcccccgtcgtcggcgtcgatgacggcctgatggcgcatgtcgctgtcgagcgatgcgctgcggttggccagcaccacgccgatccgctcggccgggcagtcgggccgtcgcccggccagcagttcgcacgatgcgacgtaggccagcttgcagaggtcgtccatcttcgaaaacttcatgttcgggtctgccagcgcgcggtatctctcgcggatgaagacgccgaacggcatctccggatgccgcgttatggcgacgtgcgccgtgtcgcgggcggtgcgtatctcttcggtctcgtcgccgcctgcctgtccggcgtttgttatgacgttgtttccgttcgctgcggcgcactctttctgtccgacgttcgctgcggcgttactctcgtccgctccggtgaatccgggttgttcgccggctgtttcctgcctgcgtttgttctgtgcgtcgtcccggtcggtttcggcgccgtttgttccgtcctgactggcgggattttctccgtcgcagtatcgtccgccgaaaacgtcgcttcgctccgccgcggcattctcgtccgtgctgcccgtctcgtccgtgccgtatgcgttccggcccgtcccgcgccggaataccgccgcggcgttgcagccgccgaatcccgatgctgttttcagcgcggcgtccgtccgggtcgtgcggtgttccgcacttatgttcagcggatagggcaccccgcactccgcatagcctttgacgccgaagacgctcccttcggccagtccgtgcaccgtgacgatgctttcgatgacgcccgaagcgccgagcgtatgcccgaaatagggtttgagcgagttgcagggcgtgccgcacagtcctgcgagatgcagtgcccggctctccatctcgtcgttgtagagcgtcgccgtgccgtggggattgaccatgccgatcgctgcggcgccgagcgacgcttcgcggagcgccgcacggattgcgaacgcgagtccgtcgcccgtgcgcgacggagccgatatgtggttcgcgtcgttggagatgccgcctcccgccacggtgacgcccgtcgccgaaagtcctctatcggccgtgagcagcaccgcgccgccggcttcgcccagcgtcagcccgtcgcgcgccgcgtcgtaggggcggcagagcacgggacttaccgatttgaaggcgttgaatccgctgacgatgaaatcgcacagcaggtcgaatcccgcgacgaagacatggtcgtactcgccgctgcggatcagccgcgacgcgacgacgatggccgacacgcccgaaatgcaggcgttcgagatcaccagcggccggttcgccgccccgaaatgccttccgacgacctccgccgtgtcgttcaggtcgcatttcgccggatcaccgttcagcaggccgatgttgcctttggtcgtggagagcaggatgagcgtccgttcgttcgcgggcgacacgcccgatcgggcgatcacctcgcccagagtcagcagcgccagtcgttccgcgggcgtgtattccgccactgcccgctccgctgtcagctgcgcaaaccgttccgggtcgatccggcagacgggcgtgccgtcgtgccataccgagagattcgtcctcccggcgcgcacggcctccatgttctcccgcgtgccgaatccgagcgctgacaggatgctgtcgggtccccaccagaccgctacttcacgtcccatctctccttccatttgcggtagaactccggcgcgagcagctgcagctcgccgcgggcgtcgagaaacacctgcgtcgagcttccctcggcgacgatttctccgtcggtggcgctgcggatcgtgtattcgaaacatattttcgccgcttcggtggcgatataacgggtctcgaccacggccgtgtcgtttacgcgcagcggctttttgtattgcagctgcagttcgacgatcggcgcggtgtatccgttggcatggatgtccatgtagcctagccccgcgaattcgcgcccgaaggcctcgcgtccgtcctcgaaatagcgcacgtattcgccgtgccacacgatctgcatcgagtccacctcgctgaaccttacgcgcagcgacgtcttgccgaccagactcgcctcggctgtttttctgcgtaccatcactcttccatgtatattttcatccggcactcggcgacgggctttccgccgcattcggtccgtgccgaaagcagggttacgttcattaccgcctgttcgacgacgattgtcgtgacgagccggctgccgaccgggggcagtgcgtggactttcaggtcgttcacggccccgatatatcccagccgcaccttttcgccgcggctgcggtccatgtatcctgcgcgcagggcggccgactgggcgatatgctcgatcaggccgcactcgctgagcgcgccctcttcgacgaagatgttgtcttcgcatacggtcagcccgctgcgggcgcatccgtcttcgccgatgccgtagaaggcgtccgccatgacgatcggcggccgctgcggaatgtattccactatttcgtccgccgcaatcagggctttctcaggtactcccataaaggtccttttttatttcgtttcagccgcagcgtatcgaccagcgcgctctgcgggtcgtcggggaaaacccacgccttgcccgtcgcggcggccgcgctgcgggcctcttccaagtcgaagtccggggcgatgtaataggccggcgccagcaggtcgtcgtccggggcgacgacgccttcgcgtgcggccagctccgccagccgggtgtgcggatagatgcgcatgcccgcataggggaacatgacggtgtattccagccggcgcgaattttcgatcgtttcgcgcacatgctcccgcgtgtcgccgtacccgcccagaatcaggaagtgggcgtagtagaccccgttgtccagcgccagccggctggcccgcacgacgtcgccgaaggtgaagcgtttgccgtaggcttccagcgtccggtcgcagaacgactcggtgccgaattcgatgtgggtcaggcccgaagccctgaacagccgcatctgctcggcgtcgatgccccgcggcgagaagtaggcgccccacgcgacgttcgtcccgcgccggatgagcgtttcggccagccggacgttgtattcgggacggatgttgaacaccgagtcggtgaagaacaggtaatttatgccgtaatcgcgcttggcgcggaggatgttttcggcgatgatttcggggtccatcgtgcgcacgcaccgcccgtcgatatgaggatacgaacagtagatgcactcgtaggggcacccccgcttggtctggatgttgagcatgccgctccgcttccagtaatacccggtcagctccggctcgaactccacttcgatcgccggcaggtaactgcgccgcccgttttcggtgcgttcgtttccggtgggtgtgttttccgtgggtgtgttttccgagagacggtttttcgcagggccgtttcccataggtccgtttcccgtgcgtccgtcgcgggtatagaccgccggaatgtctgccccggtttcgccccgttccaaggctccgatcagctccgccagcggcccttcgccctcgccgtgaatgccgtaatcggcccccagctcccgcatgaacgcctgcggatagatcgagaatcccgccccgccgataatcaggggtgcgtcgctggccgcgcgtatgacgtcgatcagcgccttgtactccggcaggaacccccgtcggtcgagcgaattggcgccgtccacgttgcgcagcgacaccccgatatagcggggcgcgagcgtgcggatgcgttcggccagctcttcgtccgtgagcaggttgcagtcggccgtatcgacacgtatcccgcttatcgtgcgctcaaggtaggttttcaggtaggaaattccgagcggataaacggggtagggcgacgtgtggcggtttgccgaaatgagtaatatgctacatgcgctcacgaccagaaccgatagaaattgaaccattgccgcggatagcgctttaccacggcttcgagcgagcggacgtagctttcgagcacgacgttcggggttttgccgtccggcgcctccggaatgtcgaagatgaagcggtaacgcctgccgcgttcgcgcatcgcatagtagaataccgccggcgcccggaacttctcggcgacgacgaagggtcccgccgggaagagggccttgcggcccatgaaggtcaccggcgccgtggcgccgccttcgacgaagcggtcgccctgaaagcagacgtactccctgcggtcgagcacctccttgatccgcaggatcgactcgatgccgccctcgttcacggggatcaccttgtagccctcctgtttgcagtgcttgtccatgacgtttttgatccgccggtattcggcgtcgtacatcacgaggtgcattttgcgggcgtagtcgccgaagaacccggcccccgtgccccagcagccgacgtgcgcgccgatgatcaccgcgccgcgcccgccgtcgagcagacgcaggaaagcgtcgtaattctcgaactcgaacttgtaccggtccgccatgccgctgccgatggccacccggtcgatgatggtctgccccagcgcgtaatagtgggcatagagtttgaccgccgagcggaagacgccgtaacggagtatgcggcggttatagaaccagacggcccgcgtggcgcggggtgcgaaagggatgaagtagacgactaccagcgagaggaaagcgtacgcggcgcgtattccgaacacgttcatcaggaagatgaagaaaccgtatccgaaagatccgccgcgcgagcgtccgctccaccgtttgtcgttatttgccattcgtccggctgatgatcaggtcgtagaagtcctgaaaagtcttcagctccttgaagtcgggacccgtgagcgtcacgccgaaattcttgtcgacgagcaccacgacatccaccagatcgaggctgtcgaggtcgagcgtttcgagcagcggcgcatcgggggtgatgacctcctgctccacttcgaattcgtcggccaaaacggtattgattttttcgatgagttcctgttgtgtcattgtctgcgtgggatttatttgcatttcttgataatgagggtcgagttggttccgccgaatccgaacgagttcgacagaaagcggtcgaaggcgaggtccaccttgcgggcggggatgttgagcttcgaggtggcttcgtctccctgcgcgaaattgatgttcggggcgatgaatccgtgctccatcatcagcatcgagtagacgatttcgctggctcccgccatccacatttcatggccggtcatcgacttggtcgaggcgacgtagggcctgttcgcgccgaacacctcgtcgatggccagcgcttcgttgtagtcgcccagcggcgtcgaggtggcgtgggcgttgacgtagggaatctctccgggctgcatgcccgcatccgccagacagcgcagcagcgagcggcgcggtccgtccacgttcggcacggagatatgctcgccgttcgacgagaatccgtatccggccacttcgcccagtatcgccgcgccccggcgcaccgccgagtcgtagctttcgaggatcacggtcgccgcgcctccgctcggtaccagcccgtcgcggtccttatcgaaggggcgcgatgccgccgcggggtccgattcgcgcttcgagaaggctcccagcccgtcgaaactgccgaccgaatagaggttcacctcctgcgctccgccgcatacgatgcgctcctgcagtccctgccggatcatcaggtatcccatgccgatcgcgtgcgagccgctggcgcaggccgccgagagggtgaggttgacgccccgcaggttgaagatcaccgagaggttcatcgtgacggtcgagttcatcgactggaagatgtttcccgaaccgaccatcgccgtattccgcttggcgcggatgatgtcgatgccctcgatcaccggggccgcgctgctgtcattgccgtagatgatgccgacctcgttggccgccagaaacgcttcgtccattcccgcgttgcgcatcgcctcggccgtggccatgtaggcgtactcgccctgctggggcaggcagagccgcttgcggcggtcgagcgcccccttcagttcggggcgcttgacgataccggtcagcgccgatatgtatcccagctccctgcgctccgggtccagcccgatgcccgaacgcccttcgcgcagcgattcggtcacttcgccgaggctggtgccgatcgaggaccagatgcccagtccggtgatgactactctgttttccatggtgtcaggtgtataatcctccgttgatcgatatcacctcccccgtgatgtaggaggccttgtccgagatgaggaacatcgccagatcggcgacctcctccgcctcgcagaagcgtccggcgggtatctgttttttgagttccgcttcgtcgaggtcggcggtcatgtccgtgcgtacgaatcccggcgcgatggcgtttaccgtcacgcccttcttggccacctcctgcgccagcgccttcgtcgccgcgatcacgccgcctttggccgccgaatagttggtctgtccgggcagtcccttgattcccgacagcgagacgatgttgacgatgcggccgaaacgtttgaccagcatgtccttcagcagcgggcgcgtgacgttgtagaatcctccgaggccggtatccactaccgagtgccactgctgcggctccatccacatcatcagagtgtcgctgcggatgcccgcgttgttcaccaccacctcgatgacggctcccttgtgccgctcctgccacgccgcgatcgccgccgcggtctcttcgcccgcggccacgtcgaaccgcagggtctccccgtcgccgcccgcggcgcggacgccttcgagcgtcctttgggcttcgtcggcgttcgagcggtagttgatgagtacgtagtagccgctccgggccagcttgagacatatctcgcggcctatgccccggcttccgccggtgacgagcgcatatttcgtcggttcggtcatgcttgctgtttgaggaagttttcgatggctgcgatctcccggtatttgggcgtgtcgtcgatgaacttgggtacgatgcggcggatgtcgtcgtacagctgccgggtctgggccgacagttctgcggcgcactccagataatccgcggcctgcaccagcgcgagcatctcgatcgccagcacctgatagccgttttcgatcacctgacgggtcagcatcgcggcgttggtgcccatgctgacgatatcctgattgtcgttgttgttgggtatcgagtgcacgtacatcggattcgaaagcgtctgcgattcggccgtggtcgaggtcgccgtgaactgcgccgcctgcaggccgtagttgagccccagcttgccgaggttcacgaacggcggcagcgtttcgttgatgcggtcgtggaagaggtagttcagctgccgctcggcgagcatcgtcatcttcgtgacggcgatcttgagcttgtccatctccagcgaaacgtagtcgccgtggaagttgccgccgtggtagatggtccccgtcttggagtccaccaccggattgtcgtccaccgaattgaactcttcgacgagtatcttctccgcctgttcgagcgtttcgagcaccggacccagtatctggggcgtgcagcgcagcgaatagtagggctgcaccttgtgcttgaaggtcggagcctctcccgtgtcgccgttgtaaagttccgtttcgcgcttgcgcaggcggcggctcgatgcgcatatttcgcgcatccggcgggcgatttcgatctgcccggcgtggagcttgcaggcgttgagcggctcggccatgaagtcgtcgtacgattcgaccacctcgttgagcatcaccgaagccttcacggcccagtcgagcaggcggcgggcctgcgcgaggttcaccatgccgattcccgtcatcacggctgtgccgttggtcagcgccagcccgtcgcggatgcggagcctgagcggcgttatgccgcacgccttcatcgcttcggccgcggagacggtttcgccgcggaacgacacttccgattcgccgatcagcgccagcgcgatatgcgccagctgcaccaagtcgccgctggcgccgacgctgccgtggcgcggcacgagcggatatatttcgttgttgaggaaatcggccagaatccgcaccacgtcgggatgtacgcccgatttggcgttgagaaaggtttgcaagcgcgcaagcatggccgcacgcacgcagatgtcgggcagcgtctcgcccgcaccgcagctgtgcgaacgtatgatgttgtattgcaggctgttcaggtcggcatcgccgatccggtactgggccatggggccgaaaccggtgttgatgccgtatattacttttccctgctcgaaatcttcgagaaaacggtaacatgcctcgacttcccggagttccgcttcgccgagcgaaacttctgtccggttgaaaatccggccgttaatggagtccaagtccgaatagtgcattttttgaacggatttatggctccaaaaatacaaaaactatctcaataaatcctttatatggtcacttttttgtttccattgtccactccggccgtgctctgcgggcagggtgccggacccgccgcgcccttacgcattccggacgccggccattcgcggtgtcgcggcggctttccggatttgccgtttcggagactcttttgaacattcatggcggatattgccgggattttattatttttgtccggactttcctgcttacctatgaaatcgaaagacatcttcactttccgcgacgccgagaaacaggccggccccgttgccttctcgacgatgctcaagccggccggctcggcctgcaacctcgattgccactactgctattacctcgacaaggcggtgcagtacggcggccggcaggccgtgatgagcgacgaactgctggaactttacgtcaaacaatatatctgcgccaacgaagtcgatacggtccagttctgctggcacgggggcgaaccgctgctgctgggcgtcgatttctaccgccgggccatggagttccagcggaaatacgccgacggcaaacgcatcgagaacacccttcagaccaacggcacgctggtcgacgaggcgtggtgcgatctgttcgcgtcgaacaattttctggtgggcgtctcgctcgacggtcccgaagacattcacgacgctttccgccttaccaaaggcggcaagccgaccttcgcgcgcgtcatggagaccgtgcggatgttcgaacgcagcggcgtggaattcaatacgctgagcgtcgtgaaccgccgctgcgaaggccgcggcgcggagatctaccgctttttccgcgacacggtccacagcaaatacatgcagttcctgcccgccgtggagcatgtcgtcgacaagccgggcttccaccgtccgctgatcgtctcccccgaccgcgaaggcgcgcgggtggccgagtggtccgtcacggccgaaggctacgggcgttttctgtgcgacgttttcgaccagtgggtcgtgggcgacgtgggccgctattacgtccagatgttcgacgcctcgctggcccagtggtgcggcgtgcagccgggcgtctgctcgatgggcgagacgtgcggcgacgcgctggtcgtcgagcacaacggcgacgtctactcctgcgaccacttcgtctaccccgaatacaaactgggcaacatcgcccagacgccgctcgacgaaatctaccgcacggccaaacgccgcgaattcggcctgaacaagcgcaacacgctgcccacggaatgtctgcgctgcaaattctacttcgcctgccgtggcgagtgccccaagcaccgcttcgaccgcggtgccgacggaagcccgaaaaactcgctctgcgaaggtttgaaaatctacttccgccacgtggagccgtacatggaatacatgcgcgacctgctgtctaaacagcaggctccggcgtgggtcatgcccttcgcccgcaaacgcatggggctggaataaccctgcccggcatacgaatacgcctgcatccttctccgggtgcaggcgttttatttgtgtccggcggacgccgccctattcgggttttgtccggtaaatggttgtcttgtcggttttgccggagacggcctctcccggcgaaggggttgccgcacctttcactccgctctttcccggccgttttttccggaagacccccagcagcggaagcaacgccgccagcgtgatgaccgccaccacgcgcagggcgtccgtgaccccttcgacgtaggtctgcgccgcggagacggtctcgtgtgcggcgtggtaggaggttcgcgccgagaagatcaccgtcaggagggcgattccgatgcttccggccagctgtttgatgctgttcgaaatgccggccgccgcggccatgtcctgctgggtgaggttcttgagcgagaagaggttgagcggcgcgaacgtaagtcccatgccgaagccgcgcagatagagtatgaagagaatatgtccgtgcgtggtgtggagcgtgaaacggctggcgagccagaaactcagcgccatgatcagaatgcccgccgcgctcagcagcagcggcctgacgtagcgggtcagataacccgaaacggccgagagcacgccctgaatcacacctacgggcaggaacatgcttcccgccgccagcgccgtgtatcccagtccccgctgcatgtagagcggcagcagataggtgccgccgagcatgcctatggcgaagagcgtcagcacggccatcgaaattccgaagttgcgttccgcgagcagccggatctgcagcagcggcgcgggattgcgcagctccgcgacgatgaaccacgccagcgccgcccccgcgacgatgaaacagccgatcacttcgggcgcgctccacccgccgggattcgacggcgaattgccccgcgccagcgcatagatcgccagcggcatgaagagcacgatggccgcgaacccctgccagtcgaacgggctgcgcgtctggttcttccactccttctggacgaatgccgcgagcaggacggccagcactccgaccggcacgttcacgtcgaatatcttgtgccagctgtacgcatcgaccagatagccgcccagcagcggcccgaacgagatcgaagccgccgcggccatcgaccacagacccagcgccagaccgcgctccgcgggcttgaactcgcgcgtcacgatcgccagtcccagcgcttgtatgatgccgcttcctacgccctgcaaggcccgcgccccgatcaggaacgggtcgctcgaagccttgccgcagagccacgagccgagcgtgaacagcaccagtccgaggatatagacgcgtttgttgccgaaccggtccgcaaaccaccctgccgaaggaagcatgatcgtcatcgtaatcatgtaggccgtgatgacccattcggccgacgagatgccgatgccgaaggccgacatgatcgccggcagtccgacgttcaccaccgttacgtccagcacggccatgaacgttccgagcatgatcatgcccagaatccaccatttgtagccgctgctttgccgtatgtgttcgcgcagattcgccattgcgcggcagtgcgtcaaaaaaaatgccaccacagcggcggcggaccgaagggcggggaaaaccggcggcctgaacagccgccgcagagcaatcggtacgccccgcgttcggggaatcgaaacgcgaggcggcagggcggcaaaacccgcggatgcggataaggctgcgcctgaaaaagaaggaacgttctcgaaaagagaacgttccgtacgtgcaggtcctgtaagccgggttctgtttccggggcgaaccccggacctctgtcatttatctagggcggcagtctcctgccgtctcaagcaacctaccccccggcatcgggcgagcaacccttaattgccggtatacacggtcttgcaacccgcgagacgtactgccgggcgacatcgctgcccccgcggtgggctcttaccccgccttttcacccttacccgccgggaaatcccttgtgggcggttcttttctgttacgctcctataccctcacggatatcaagtcattagcttgcgcggcgctctgcgttgcccggactttcctctcccggccacggccggcagcgacagagcggacctgcaccgcaaaggtaataaaattcggcggtattcccgcttcggggggggcgcgatattcggaaaatgcgtttccctcctccgtacgggccgtaacgatgcggtgcatgcgaagttttttggaaatatcggattaaatagtacttttgctaaaggctgattccgtctccggcggcagccgaatcgtgcgaataacccggcctatgacagataacgcgcaaacaatcaacatgcaagacaaccgtacggttgtgggtttgctccgcgccggagacgaaaaatgtttcgacgcgctcttccgccgttattataaacccctctgtacctacgccacccgtttcgtcaccccggcccgcgccgaggagctggtgcaggatacgctgatgtgggtctgggaaaaccgcacgtcgctgctgcccgaaatgcccctcaagtcgctgttgttcaccatcgtcaagaacaaggcgatcaaccatatgtcgcgcgatacgatcaaaaaccgcgtgatccgccagctcgccgaatactacgaagaggagttcgacgatcccgatttttacctcgaaggcgaactggtggagcgtctcacggccgcgctgcgcaagatgccgcccgaattccagcagactttccgcatgcaccggctcgaaggcaggacccacaaggagatcgccgccgcgctcggcgtgtcgccgcagacggtcaattaccggatcgggcagaccgtgcgcctgctgcgcgaagagctgaaagagtactggccgctcgtcgttttgctgttgtggccggacctgcactgaaaaaataccgaaaattccctattttttttgaattccgtttagcatcctctgccgacggattgtattactatatagattagcgaacagatgacgaatttacagatcagcgaagaagtattggcagcctacctgagaggcgaactgaatgctgcggaggccgcggccgtcgaagcgtggtacgacgcgtcggccgccaaccgcaaactgcttggggaggtttattacatattatatgtcaacgaccgtatcaacgatacggccggtatcgacgtcgagcgttcgctccgtcagttcaagcgccgcatgcacgccggacgccgtatctccttgcggcgcatcgcggtccgcgccgccgccgctgccgccgtggcggtgattctgctggccgggggcgttaccaccgtgtcgctttccaaacgccttgcgcagcccctgaccgtcatcacccatctgggcgaacgttcgcaggtggtgctgcccgacggcaccaaggtctgactcaactccgccagcagcgtcgagtacgtcgctccgttcttttcgcgcgaacgccgcgtgaagatggacggcgaagcctatttcgaggtgcagcacgacgctcaggcgccctttgtcgtctcgaccaacggactcgacatcaaggtgctcggcacccgcttcaacatccgcaacgacgacagcgaccaccgcatcaccaccgtcctgctcgaaggagcggtcaaggcctacgcttcgggcgacgagaaggccgccgtgcgcctgcgcccctcgcagcagttggtgttcgatacccggaccggcgccatgcgcctgaccgacgaaccttcggccgaccggtcgatcaactggatcgacggccgcttctgcttcgagcacgacaccttcggggagatcgtcgccgaactcaaacgctactacaacgtcgatatccgctttatggacgaagccctgcgcagcgaacgcttctccggcgacttccgcgtcgaggacggcatctaccacatcatgtcggtgctgcagctcacctataagttcacctacaaggtcgtcggcaacgacatcgaaatctacccgaatcctaaacgataacctaataccaacctgaaaaccaccgaaccgcctatgggagaataatacgtcagttttcgcaggccgctgtacgcagcggcggtttttgacaatctacttttcaaaatctaacctaaattcagatccatgaaaaaaacttaccttgcagcaggcaggggagtgcatgccgtctccgcatgtttccgttgtctgtttcttatcccgattttcgtattgggatgcttcggcgctcatgccgcagcacagacgcagcagtccgtttcccgcgtcagcctcgacgtccgggacgccgctatcgtcaacgttttccaaaccgttcagcagcagaccggctgctcgttcgtctacaacacgtcggacatcgacaccgaccgcaaagtgaccgtttccgcgcaggacgagccgctgacggctctgctcgacaaacttttcgcaggttccgacatcgcctacacgcttcgcgacaagcacatcgtcctttcgaagaaaactaaaaattcccccccccacaacgctcagggcggagtcagcggaaccgttaaggacgctcagggcatgccgctgatcggcgccacggtgctgattcagggcacgacgaccggcgtggccgtcgatctcgacggcaatttcatgctgccgcaggccaaggtcggcgacacgctcgaaatttcgctgatcggctatgccaagcaaacccttcccgtaacgggctccgcgccccttcaggtggtaatgctcgaagacaacgaggtgctcgacgccgtcgtggtgaccgccctcggtatcaagcgcgccgagaaatcgctgacctacaacgtgcaggaggtagccggcgacatcgtcacctcggtcaaggacgccaacttcatgaactccctttcgggtaaggtcgccggccttcagatcaatgccagtgcatcgggcgccggcggttcgacccgcgtggtgatgcgaggcgtcaagtcgatcaacggcgagaacaacgccctctacgtgatcgacggtattccgcttccgagcctgcgttcgagccagacctcaggcacgtatgaaacgcccgacggcggcgacttcgaaggtatcgccaacttcaaccccgacgacatcgagtccatgtcgatcctttcgggtgccacggcttcggccctctacggtgctcagggcgccaacggtgtgatcctcatcaccaccaagaagggcaaggagggccgcgtgcgggtcaactattcgaactcgacgaccttctcccatcccttcgtgatgcccaaattccagaacacctacggcacgagcgaaatcgagccgatgatgagctggggcagcaaactcgccacgccgacttcgtacgatcccgcggatttcttccagaccggattcaacgagaccaactcggtgggcctttccgccggtaccgaacgcaaccagacctatgcgtcggcttccgccgtcaattcgcgcggtatcgtacccaacaatgtctacaaccgctacaatttctcgatccgcaatacgacgatgcttatcaaggaccgcctgacgctcgacgtgggcgcgacctacatgaagcagtacacccgcaaccagactattcagggccagtaccgcaacccgctggtgggcatctacctcttcccgcgcggcaacgacatccgcaaatacgagatttacgagcgtccgggttccgactcgcgctatatggagcagttctgggacctcgaattcctcaagggcgtcgagaacccgtggtggatcaccaaccgcgagctgaacgaaaaccgtcagcaccgctacagcttcaacgctacgatgaagctcgacatcaccgactggatgagcctgacgggccgtatccgtaccgataatgcgacgatcaactacacccgcaaactcagcgcttcgaccaacacgctcttcgcttcgaagtacggcagctacctgaaccgcacgatgacgcacaacaacctctacggcgacgtgctgctgagcatcgacaagagcttcttcgacaatgccttctccctgcagttcaacctcggcgccagcatcatggacgacaagaaccagctgacgggttacgaaggttatctggcgggcattcccaacaagttcacctacaacaacatcatctccgacaactcgcagagtttcccgacgcaggagaactaccacgaccagattcaggccgtgtatgcgaccatgcagctgggctggcggggtatgctctacgttgacgtttcggtccgcaacgactgggcctcgatgctggccttcacgcccaaacagaacatcttctatccttcggtgggcctttcggccgtgatttcgtcgatggccgacctctcgaaggcgggcatctcgttcctcaaggtgcgcggatcctatgccgaggtgggcaacgctcccgaacgttacatcaccggtcccaactacacgctgaccaacggcgtggtgagcacggcgacgatcgctccggccaagcacctcgaagccgagcgtaccaagtcgttcgaggccggtctcgacgtcaagttcttgggcaacaagatctcggctacggctacctactacaataccaacacctacaaccagctcttcctttacgacgcacctcccagctccggctacaaacagaaatacatcaacgccggcaaggtcaataactggggtatcgaggcttcggccggatacaagaacacatggcgcgatttctcgtgggccacgaccctcaacttctcgatgaaccgcaacaagatcaaggagctggttcccgaaggcacccgcgatccggatacgggctcgctggtcgatatcaaggaggtcaataaggactacggcggttaccgtgtcaagctcgtcgagggcggttcgatcggcgacttctatgtcaaaggcctgctgaccgacgacaagggtcatatctatgtcgatcccaactccaacaccgtgctgctcgatcccgatcccgaagcctacatcttcgccggcaacaccgaagcccgcttccgctggggctggaacaaccagttctcctacaagggcgtttcgctcggcgtgctgatcgacgcacgtatcggtggccgcggcgtatcggctacgcaggccctcatggaccgcttcggcgtttcgcaggattcggccgacgcccgcgagaacggcggcgtatggatttccgacgaccagcaggttcccgacgccaagaccttctatgccaacagcggcgacggcatggcgatgctttcgcactacgtctacagcatgaccaacgtccgcctgcgcgagcttacactgggttacgacctgccctccaaatggttccgcaacaaggtcaatatgagcgtatcgttcgtcggccgcaacctgttcatgttctacaacaaggctccgttcgaccccgaagtgaccgcttcgacgagtacctactatcagggtgtcgacttcttcatgcagccgagcgtccgcaccctcggattcagtgtaaaactccaattctaaagctcaaccgactatgaaacgaaacaatatcaaacaaggattcctttcgctggcggccgcctgtctggcgttcaccgcctgcaccggggacttcgagcgcttcaataccgaccccaatgctgcgcaggatgtggatctgaagatgttcatcaccaccatgcagatggacgccgtctactcgtgcagcggctcggataccgatcccaacaaccgttatcaaaaagcttataacctgatcggcgacgtatacgccggctatatgtccggtacgaacaactgggacggcggcaccaacccccagatttatgcgctgaacggcagcgattggtgcaacgtacctttcagcgagtcgttcaccaatgtcatgcccgcttggctgcagctgaagtacgcccacgccaacggtttgctcagcgacgacatcttcgctgtggctaatatcctgaaagtcatgtcgcttcatcgcgtgagcgatatctacggcccgctgcccgtgctgcatttcggcgagacggagaacccttacaattcgcaggaagagtgctatatgcacttcttcgagacgctcgacagcgcgatcgcggtgctgaaggacgtcgtggagaacaatcccgacgccaaaccgctcgaagaggtcgatgccctctaccacggcgattattcgaaatggctcaagctcgccaactcggtgaagctgcgtctggccatgcgcatctgttacgtgaagcccgaccttgcgaagcagtacgccatggaagccgtccgcgacggcgtgatggagacggccgacgacagcgcgcttttccagagctggggatccattacgatcatcaacccgctcgaaaagatctggaacggctatagcgacacccgcatgggcgcttcgatggactcctacctcaacggttacaacgacccgcgtcttccggtttatttccagcctgtcaccgaaggcgacaacaagggcgaataccgcggtgtagccaacggaatgcccaatccccagcaggatgattacaaggccatgtccgcgcccaacgtacaggagaaatccaccgattcgcccctgcgctggatgatggcctcggaagtcgcgttcctgcgcgccgaaggtgccatgcgcggctggacggccgagatgggcggtaccgccgaggagttctataacaagggtatcgagctgtcgttcctcgaaaacggcctgagcgccgatgccgccgcaaggtatgccgccgacgaaacgagcaaaccgaccgacttcaccgacgtttcggccgccaataccaagtataatatttcggccttgggcaagattacgatcaaatggaacgccggcgcttccgaagaggagcagcttgagcgcatcatcacccagaaatggatcgccatgttccccaacggcaccgaggcttggtccgaattccgtcgtacgggttatcccctgattttccccgtacgctccaactatccgaccagcggcgtcgataccaacaagcagatccgccgcatggtcttcccgcagtcggaatactccaacaacggcgcggccgtgcaggaggccgtcaaactgctcggcggtcctgacaacggcggcacgaagctgtggtgggacaaaaagaattagtaacctgaaactatacctgagtaaactatgaaaaatatattgaaacatgcagtagtttgtctcgtgctggcggccgcggtggcctcctgtacgaaggagacgacgcctgagcggatcaatatccagcatccggaccagcagtcgccgatcctgcgcgacaatgcctattaccagaatctccgcgcctacaagcagaccaaacacaaactggctttcggctggtacggttcgtggacggccgtcggcgcgtcctatcagtcgcgtctgatcagcgccccagactcgatggacatcatctcgatctggagccagtggcacacgctcacgccccagcaaatggccgataaggagttcgttcagaaaacgttgggtacgaaagtgacctatacgattttttcggataaactgcccgaaccgttccttgaaatcggcaacggtgaatataccgacgaggccattgaagcttatgcaaaagcctattgcaaagactcgatggacaagtatcagtacgacggcatcgatatcgactatgagccgggctatggtgcatcagggccttttgtcggacatgacaatgctctgtttaccaagttgatcaatgccatgagcaagtatgtcggtccgaaatctggtaccggacgcctgctgataatcgatggcgtgccttatgcggtggatcgttcggttgtggattgtttcgactatggtatcgtgcaggcgtatgcttcttctggttataccgatctgcaaaatcgcttcaataatgccgatgcaaaaggctggaagcctgaacagtatatctttgccgagaattttgagtcttattggaaaactggcggtgtggattttacggaccgcgaaggtaataggatgccgtctctttacggtatggcgacctttaatcccacgcagggtgccggcgccggattcggtgcataccatatggagtacgaatacggtaattcggccatgccgtaccaatttatgcgcaatgcgattcagatggccaatcctgccggaggctggaaaacgcctatcgatgtggctttttcgagtaaccaatcttccaacttttcgttcgttgtcgaggacgatggttcggtgaccggaacgatgcaggataaagtttcgttgtcgttctcgcgtcccgttgtaagcggtatgcagttgacgctgggtgtggataattcgctcgtagccgtttataacgatgagaacggtacggaatatgagaccgtcgatccgtcgttggttaagatggagccgatccagtgcgccgaaaatcaggtgttctctcccgatgcgacgattacgcttgatcctaagtcaatcgaaaaggggtattatttgattccggtggtgatcagtcctatttcggatgccggatatgccgtcaaggagggctccgtacattatatcttcgttacgaaggtcgcgatggatgtcgaaatcggcgcgacgacgctcgacggctcgaagatcgctccgacctcggcatggacgatcacctgctgtcagggtactgcgacgagcggcgccaccggtgtttggaactgcgactccgccgcgcagaaagcggccatgttcgacggcaagctcgacgccaactgctggtatgcaaacagcgcttcctattcgtggggcaacggcggcaacttcaccatcgacatgggcgaagtcaacgacgtgaccggcctgcgctggcatatccactatcaggattccgaaccgcagtgcaccgacctcacctacagcgaagacggcaatgtctggtacagcctttcggccggcgttcccttcactccggtgctgtccgacaactggaagtgggtcaaattcaagagaacggtcaaagcccgctatatccgggtttacgtgggtcttgtaacgggctggacgagcatgaacgaagccgaaatctacggcccggccaactagcgatttattaaccagaaaaaaatgtatgttatgaaactgaaatatttaatcgcccctttcctcctcgctgcggctgctctctgcggctgtcaggagacggcggaaatccatccggtggcctacatgaccgatgcgcagaagacggtttccaagtcggttaccatcgatacgcccccggccggaacggagatttcggtctcctcctcggtgcctgtgaataaggataccaaaatcaagatttcgttgcgccccgacctgctggaggagtataatgccaaataccagaaaaattatgttatgccccccgcagacagttatacgctcagcggtgacgaagtggtgatctcggccggttacagtcgctcctcggaggtcgattttaccgtcacgtcactcgatgactttcaggagggtacgacctactgcatgcccgtgagcatcgagcggatcgaaaacagcggtcttgccgttttggaaccttctcggacacttttcatagtattaaaaacaccggttatcagtaaggctatctacctcggatcaagtaacatttataaagtgccgtcgtttcaggaagacgccaatcttgctgcactcaaagccataacgcttgaagcccgtgtctatatggacggattccagaattatgatccttatattagttcgattatgggtattgagggcgagtgcggtgtccgcttcggagacgtgaaggtccccaagaacgttcttcagatctgccatggcgattatcagcctgctgcgacctctaaaccttttgatacgggcaagtggtatcatgtagctgccgtatggtcggggaagagttgggatatttttatcgacggcgtgtatgttactggtgttgcgacacagggggagaccatcaacttgtcgagcgataattcgggcggtttttatctcggcgcttcttatggcggtggacgtccgctcaatggttatgtcgctgagtgccgggtctggacgcgtgcgctgactgaggccgagatatcgaacaacatgaattatgtcaatccggaatcggacggcctgctggcttactggcgtatgaacgcttgggaggccaaggacggcggcggcaacatcgtcaaggaccttacgggccacggctacgacgccgtgggcggcagctccaatccgaggatgatggacaccaagtggatgtaatccgcctttcggatatcgttccgatccgctgaacggaagccgtgcggccggtgcaggagactgccgccggggcacggcttctttttattccgctttttattcccggcggaccgtttgcttccggcggagatgaatcccggcttggcgatactctctccggcggcggcaaatttatttgacgcggcgccggattgtgttatctttgtacgaagaaccgaacttatcaccataaaacttaccgatgaaaccacgacttttgcttttcaccgccgcatgcatgcttttcgcggcatgcgggaactctcgcggcgacctttcgacgggtattatccccgctccgcagcaggtggcgtggggcgacggcgccttccggatgccctcgacgctgctctttgcgaccaacctcgaagggcaggccaaggccgaccttgaggcgtggatgcggcgctccggcgacggctttttccccgtctctttcgccgaagccgccggggacgacatccccgttctctacctgctgcttgccgagggcggcgcgcccgaaagctaccgcctcgacgtcgcccgcggaaaaatcaccgtcacggcgcccgatgccgccggactcttctacggacttcagtcgctgggccagctggccgaacgctgcggccgccggattccggccgttgtgatcgaggacgctccgcgtttcggctaccggggcttcatgctcgacgtctcgcgccacttccgcgacaaggagttcgtcaagcggcagctggacctcttggcccgctacaaattcaaccgcttccactggcacctgaccgacggcgccggctggcgcatcgagatcaagaaataccccgtccttaccgacatcgccgcatggcggccctatcccgactgggaggggtggaacttcggcggcaaacgctactgccgccgcgacgatccggcggccgatggcggctactatacgcaggacgaaatccgcgaggtggtcgaatacgcccgcgccctgcatatcgaggtgatccccgaaatcgagatgccgggccacagcgaggaggtgctggccgtcttccccgaactttcgtgcagcgggaaaccctatgtcaattccgacttctgcatcggcaacgaacagacgttcgaattcctcgaaaacgtcctttccgaggtgatcggactcttcccctcggagtatatccacatcggcggcgacgaagcttcgaagcagggctggcgcacctgccccaaatgcgccgcgcggatgcgcaaagaggggctgaaagacgtcgatgagctgcaaagctacatgatccgccgcatcgagaccttcctcaacgccaagggccgccgcctgctgggctgggacgagattctcgaaggggggcttgcgcccgacgccacggtcatgtcgtggcgcggcaccgagggcggcatcgccgctgccgccgccggacatcatgccgtcatgaccccttcgaattactgctacctcgacttctgtcaggacgatcccacgaccgaaccggtcgccgccgcggcgttcctgaccctcgaacaggcctattcctacgatccggctcccgattcgctcggcgctcaggtcgtgccgatgatcctcggcgtgcagggcaacctctggtgcgagcacgtcccgaccgccgagcatgccgagcatatgatgtggccgcgcctgctggccgtcgccgaagtggggtggagtgcgcctgaaaggaaggattacgacgacttttatgcccgtgcgctcgacgccgtggcatggcttcaggagcgcggataccaccccttcgatcagaagaacgccgtggggccgcgtcccgaatcgctcgaacccctccgctgcctttcgaccggcaagaccgtgatttaccatacgccctacagtcccaaatacgccgctgcgggcgacggctcgctgaccgacggactgcgcggcggctggaactacggcgaccgacgctggctgggctggctcgacaccgatgtcgatctggtcgtcgatctgggtgagcggcagcccgtgcggcgcatcgccgccgatttcatgcagggcttctacgccgatatctggatgccccgtgcggtcgaattttcggtctcggacgacaacgagcgcttcacgcccctcgccacggtcgggaacgacattccggtcgaattcaagcaggactgctacagggagttcggctggacgggccagaccgaggcgcgttacgttcgcctgaaagcccgtcacaacggccgtcccggcggctggatcttcaccgacgaaatcatcgtcgagtaaccgtcgcgttgcgtccgttttgcgaaaagggatgcggccgtcaggccgcatccctctttttgacgggtccctgaggaccttaggtgtgtcgttacttgcggatcagccgctgtacgcccgtcggggttgcggttttcggcatctccgctccggcgagcggcgcgatgccggtttcggccttgacttcggacttcgttacggacgccgaatttttggtcatcgtgtaaggcccgatcgcataatcctgcagcgtatatccggccttgaagagatccggccaaatgacatactgaccgcccgaatagatggcgtagtcgatgccgcatacggtgtattcggtcccgttataggtgaacttccggccttcgaacagcactgagttactgcctatgtcataactgcccgcgatcagctcctgatctgtggtgtagatcgggtagggcggcgtttgcgtgggatcgttgaaatgatacctaaggtatacgtatgccgtcaggccgtacatgccctgcgggtcgaacgtcggaatcgtgacgttgccgtcctcgttgtatttgagcaggaaggggtagtcgtcgcccagcgtggtgatgccccagcccttgaccctgaagctttcgttggtgcggtagggcgtgatctccacggtgtatgtctggggctgtttgttgatttccgacgaggtcgaggtcacggtccaagtgcctatataacgctcgtagtcggcctcgcccgtcggtacggccgggatcttcacctcggtctgttcgatggtcgtgccgtgggcgttggtgcccgatgcgaggaagatgtattctgtatcagcatcgacgttgaaatagaacgtggctccggtttccgaattcgcctgcgtcacagccgccgaactgatggggttgccgtagcggttcatcactttttcaagctcgcccatttgttcgatcagttccgggagcagcgctttcgtcgtgcagagaacctttcccgatttcatctccgtactcttgacggtgcccgacagctggaagtactccttgccttcggcgggcgcagccgtcagcgtgagcgtcggcttggccttcgtgccgtcgctgatgccgccccacgggatcggaatatcggcgtaatcggccatctgcgtacagcccttgaaggtatccttgtaactgctggccgaggtgaagatcttggcgccgaagatgtcggggtaattcgtgcgttcgtagaggtgcaccttgacctgctgctcgccgtcctgcaccatcgtgtagggcgattcgccggtgaaggcggtgcagccgctgaaggttttgctcgccgtcgagatttttttcatgctgtcgaaaatggttacgggcagcgattcgagcgacgtgcagttgaggaacatttcgctgatgatggtcgtaccttcgaaatggcggaacatgtcttcgggaacggtcttgagcgacgtacagccgctgaacaggtaagcggcggacgtgccgtttttcacgctttccgggaagtagtccgcaggcgccgtttccagctgcgtgcagtctttccagagcgcgggaatcgttttcagcgcgacgcagtgcttcagcgaggggaattcggtcagtttgatacacccttcatagagatagctggccgtggtgattttggtcatgttcttgaaaatatcgacgggaatggtctccagcgtcttgcagccgctgaacagactgttcatgttcgtcgcttccgtgagggtgtcgaacagcccttcggggagtgatttgaggtttgcacaccctttgaacagcgacgcgacgttggtgagcttggtcatgttctggaacagctctgcgggcagggtttcgagcgccgcgcagccgaagaatcccgacgtgaggctgttcgcttccgtctggttggcgaagaatgtttcgggaacgctcttgagcgatgcgcagttgttgaagatgcttccgaggttggtcagggcgggcatgtcggccagcagtcctgccggaacgctttccagcgccttgcagccgctgaacaggccggatgccgaggtggcttttgtcgtcttttcgaagagtttttccgggacgctctttagcgccgtgcagttgtagaacatcgaggcgaccgaggtgatttcgggcgcgccggccagcagtccttcgggcacggtttcgagcttcgtacaccctgagaacatgttttcgaccgaagtgacggcggcgaaggcgtcctcttcgggctggggcacggttacgagcgaggtgttcgcgaaggcgtaatccagcgtcgtcatgccgagtttgccccattgtctgacttcgagaatggcgggagccacggttttgttggtgagtcttccggagagtttctccgtggttccgcttatggttacgtaatagatgccggattcggcgtaggtgtggttcaccatcgcggccgcggtcgagatcgtggctgcgaccggctcgctctggccgtcgccccagttgaccgtgacgtccacggcgccgtagaggggcaggtagaccttgttgttgtaggcgctgctgctgtattccttcgcttcgaccttgagcaccatctgggccgggtcgtaataggcttcctgatagatcaggatggtttcgatcaccgtctctcccgccaccagctcgatgttggcgctgcgggactgggtttccgtgttggccgcgacgttaaaggtcagggtttcggtccgaatctccccccccctcgtctctgccagcgtaatccatgctttcgcggcttcgggaatcgctaccgtgtaatccagatcggtctccacctcgaccgttacggggcctcctgcggccgtcgcctccttcgaggaggtcgagacgttcagcacgcccgacacgaatgtcagcgtgcgcatcagcgtcttggcgtcgccgtcgctgaccagcacgatgaccttgccggtcgagctgttgccgggagccgtcacggcgatcgttccgccttcgttgcccgtgcgtttcacttcggccttccatgcgccgtcagcgagggcctgaatgtcggttttggcgtcggctccggtcagcgtgaagggaatttccgccgtttcgcccacgcggatcgtcgccgaggcggtgtcgaacgcgatgccgaactgcacgtacaactcgaacgtcagcaccgttccgtcggccagcgtcaggtaaaccagcttgccgtcctcgctcgtggcgacagacttgaacagattctggtccgtctgggcctgtccgcagtcggtccacgtcgcgccgttgtcgtaggatacccaccaatggctgttttcgatcttgaattcgggggtgacgcccgatacgggaagttttttgccgttgtcgaggataaagtcgccgttgagcgtccagtagtagacaccgtcggaatcctgtttcaccccgatgaccgacgaagtcccgtcttttccgtcgctgatggtgatcgtcgaggtctcgccggccgcggtgaccagcgtgatgacgtagccgccgtcttcaccgggctgtacgtccgagatgaaccgtttcccggcgacaagctccttgagtgttgtgacgtcggagttgagcgccttgacgagcgcctgcagttcggtgagctgaccgtcgaggtcgtccaaccgtttttggatgtccgtatcgtcgtacgaacatccgatcagtgccattagcggcacaatcatcagaagaatttttttcatggcaaggcttttaaagaaattggtttaaaagaactgagtgatcgcttcaaatatagtaaaattgatgatttctgctgcattttctccggattttttgtttaaagttgccttgcaagctcttctgaagggggtgatccgggggtgcagcgggtgatgtaaagtctcttgcctgtttgttttattgttaaatattgacacggcgagccttcgcaccatacgggatttcgtttgtcttttattgctccgaatgcggcaaacggcaaagggggagacgcatcatcgtctccccctttaccgtattttttacggataaaattctttccgaagtaagttattccctgaagatgttgaggtgcgccagcagcggattgcggcggtcgagcagcaggaactccgccagcagcaacacgattgccgcgagcagcaggtattggtactgttcgttgaactcttcgaagcgcatcaccgacaactcgctctgctccatttcgttgatgctcttcacgatctcgtcgagaccgatcgactgcttgctcgaacggacataggcgccgcccgtgatgtcggcgatctgggccagcatctcctcgttgagcttcgaaacgaccatgtcgcccttctcgtccttgatgaattcgccgccgatctgaatcggggcgccttcgggcgtgccgatgccgatggtgtaaatccgtatgcccatctccgcggcgtgccgtgcggccgccagtgcgtcgtcctcgtggttctcgccgtcggtgatgaggatgatgacgcggctgtggttctcctcggtttcgcccgaaaacgacatcagggcctgcgacagcgccttgccgatggccgtgccctgcaccggcaccagcgacgggtcgatgcgcttggcgaaggccttggccatgcggtagtccgaggtgatcggcagctgcaccttcggctccccggcgaagacgatcagcccgacgcggtcctgatgcagaccgtcgaagagcttgttgatggcgtatttggtcctctccagccggttgggttcgaaatcttcggccagcatcgagttcgagacgtctacggccagcatcatctcgacgccctgcgtcttctcctcgcggagtttcgacccgaactgcgggcgtgccgccgccagtatgagcagcgtgaccgccgtgcagaagaggatgaatttgagcgtcacgcgcccggtcgatacttcgggcatcagctcttccaatacctgcatgcgcccgaagcgttccagccgcctgcggcggttgcgcgccgccagccagaagaggaggatcagcgcgggtatgaccggcagcagccagaaatattgcggatttgcgaatctaaacattgcaaattacgttttacggtattcttttcagcaccagattcgagaacaggaactccagcacgagcagccccagacccgccagtgcccagagcaggaactgctcgtggtaggtgacgtgttccgtaacttccaccttgctcttttccagttggttgatctggtcgtaaatggccttgagcttggccttgtccgtggcgcggaaatattgtccgccggtctgctcggcgatcgacctgagggttttctcgtcgatctcgaccttcgccatgacggttcctccggtcggcgtgccgtagatgtccacggcggggtagggggccatgccctcggtgccgacgccgatggtgtagacgcggatgccctgcgccttggcgatttcggccgccgtctggggcgcgatctcgccgcggttgttcacgccgtcggtcagcaggatgatgaccttcgacttggcttcgctctcgcgcaggcggtttatcgccgtggccagtccgttgccgatggccgtgccgtcctcgatcagtccgctgcggatgcgtgccagcagcgtctggagcgttccctgatccgtcgtcagcgggctttgcgtgaaggcttcgcccgcgaaggccaccagtccgatgcggtcgccgtaacggtccgcgatgaacgatccggccacctccttggccgccgtgatgcggtcggggcggaagtcccgtgccagcatcgaacccgaaacgtcgatggccagcatgatgtcgataccttcggtgttcgtgcgcgaaagacgctcgacgtcctgcgggcgcgccagcgccacgatcagcagggccagcgccgccagccgctgtgcgaacggcagatgccgcagccagtagcgtacggtcttcggcgcgcgcacgaccccttcgacgctcgaaatctggatcgacgcgccgccctgcagcgtacgccacacgtagtaggcgatcatcggcacgagcgccgacaacagccacagataatatggtgatgcgaaatgcatagttcctcttttttaccagtttttcgatccgcgcaccacgacgccctgcttctccttgagtttgtcctgcgtgcggtcctcctgcgcctgaatggcgtcgagcatctgctcctgctcctgcggcgaaatgccggccggaacgggctgcggctctccctgctgatcgccttcctgctccttgtcgggctgcgcggggttctgctgcgggtcgccctgctgctccttgtcgtcgccctgccccttgtcgtccttctgttggtcgtctttctgctgatcgccgttctgctggtcctgaccgccctgttgctgctccttgttctggtctttgtcctgattcttgtcgtcaccgccgccaccgccgccgttctcgtcgtcgatcagacgcttggtgtaggcatagttgtatttggcctcctgatccgagggattcagccgcagcgactgcttgtagctttcgagcgcttccttgtatttctgctgcttgaactgcgcgtttccgaggttgtagaaggcttgggcgcgctcgtcgtccgtgcgcagcgtatcggccgccgcctgccgcatggtctgctcggccttgtcgaaccgttcggccttgtagagcgcgtttccgaggttgtaacgggcctcgaacgattcgggtgcggcctccaaagcccgctcgtaacgctcgatgctcttttcgtaattgcccttgttgtactgccggttgccgcggcgcacctcgctgcgttcgggcatgtcctgcgccgaagcgccgagggcggcaaagagaaatacgatatataggagtctgtacatcttgttacgcattttggttttgcatcgggtccggctgctccggctcctcctcttcgacgacgagcttggtctcctcgacgaaatagaacgccttcaggtagtcggcttcgttctgctcgccgtcgggcgtcgccttggcgaacttcaccagatcggcgtcgcgcaggatcgccgtaaggtccatccgggccttgtcgggcagctcttcgctgcgcatcgcctcgatgatctcgtcggaggtcatctccatggcgcccacgccccagcgcgccgcgatgtaggtgcgcaggatgtccgtcagtcccgaataatactgcttgtgcctgttgttctgccatagtttctggttgtgcagcgcttcgagggccttgatcgccaccacgtggggcggctgcggcggcgcgggcttgaacaggtcgcccagccccttgccgtaacgggccagaatgcgcttgagcgcatagagcgccaccagtgccagcagcagggccagcacgccccatttggcgtatccgctgacctccgcgaagcggaacggcaggttgcgctggggtttcaggtcgtagatcgactgcgaggtcgagtcgatctggaacgtggccacctccagatagagcgagtcgcgcgcccggagcgtatcgacgatgttcttgtcggcatacagcacggccggcagtccgaggttccacttaccctcctcgaacgccgccagcgtgtagcgcttgcgcagcctgaggtggcgtccgtcgcgttcgagcgtgtcgatcgggtggtccttgaccagttcgagggggcttccctccttgttttcgaattccgggaactgcaccacctgcaccagatccttgtccacctcgaccgtcaggtcgaaccggtcgccgatcatgatgctgtccggctcgatgcgcgccgtgaccgtcggtgcgttctgcgcccggacggccgcgcccgcaaggagcagtgctattgcaaaaagtcgtttcatcgctgtttgaacagttttaacagttcggccacgtaatcgccgtcggtcgagatcatcgtcgaatcgatgcggttgtgcttgagcgtcgagtcgatctcggcgctgcgtcgctcccacgtccgggcgtagtgctcccgcacggcccgcgacgaggtgtccacccataccttgcggccgctctcggcgtccttcagctcgacgatgcccacgtcgggcagctccgtctcgcggggatcgtatacgcggatgcccaccagatcgtgcttgcccccggcgatcttcagcgcgtcgtccagcgcggccttgtccttcgacgaatccatgaagtccgagaggatgaaggtcgtgcagcgtttcttgttgacgttggtcagaaaccgcaccggctccgaaagcttcgtgccggtcgattcgggccggaagcccaccagctcgcggatgatcatcaggatgtggctgcgccccttcttcggggggatgaacttctcgaccttgtccgagaagaagatgcagcctaccttgtcgttgttctgcgcggccgagaaggccagcacggcggcgatttcggtgatgatgttcttcttcaggcggtccgtcgatccgaacatgcgcgatgcggagacgtccaccagaagcatcatcgtcagttcgcgctcctcctcgtagattttgatgtggggtttgcgcgaccgggccgtcacgttccagtcgatgtcccttacgtcgtcgcccgcgcggtactccctgacttcggaaaacgacatgccccgtccgcggaaagccgtatggtactttccggcgaagatctcgttcgaaagaccgcgggtcttgatctcgatcttacggacgcgtttcagaatatcgttctcggtctgctgcatcgttagggtacgattacgttgttgagaatgtcggtgatgatctcctccgaggtgatgttctcggcctcggcttcgtacgtcaggccgatgcggtggcgcagcacgtcgtggcatacggcgcgcacgtcttcgggaatgacgtacccgcggcggcggatgaaggcgtaggcgcgtgcggccttggccagcgagatcgacgcacggggcgaaccgccgtatgcgatcaggttctggagcttctggaggttgtactccgccggctcgcgcgtggcgaagatgatgtcgatgatgtatttctcgatcttctcgtccatgtagacgtcctccacgaccttgcgggccttgacgatgtcttcgggcgagatgaccttgttgacggcggggagtcctcccccggcgaggttcatgcgcacgatgtcgcgctcctcctgcttcttggggtaggatattttggctttgagcatgaaacggtccacctgcgcttcgggcagcgggtaggttccctcctgctccagcgggttctgcgtggccagcaccagaaagggctgcggcagcggataggtgttgtcgccgatggtcacctgacgctcctgcatggcctccagcagtgccgactgcaccttggccggggagcggttgatttcgtccgccagcacgaagttggcgaatacggggcctttcttgacgacgaactcctcgttcttctgcgagtagatcagcgtaccgatcaggtcggccggcagtaggtcgggggtgaactgtatgcgcgagaaggcggcgtccacggccttcgccagcgtagtgatggccagcgtcttggccagtcccggcacgccttccagcagaatatggccgttcgacagcaggccgatcagcagcgtgtctaccagatggctctggccgatgatgaccttgcccatttccgtacggagcgtatccacgaagacgctttcgcgttcgatgcgctcgttgagttccttgatgttgatgacttcgctcattgttttatattgttgaatttcattacctcttttccgcgccctgcatgtccggcccggcaaatccggccccgcatactctgccggcaaccccggttccgcacatgctgcccgacaaacccggtccgcacattcggcctgcatgctcagcccgaaaatcccggccccggactgcgggcgcagagagcatgtcgccgtattgccgtcggatttagttttttaacgtttacaatgcaaagatattattttctttgaaaaaaacttattcaattcttattaactttgccgtcatggaatccaaagaatcacctattttacaaggcctgaaccccgctcagcgcgccgccgtcgtgaattacgacgccccgtcgctcattatcgcgggcgcgggttcgggcaaaacgcgggtgctgacctcgcgcatcgcctatatgatcgagcagggcgtggctcccttcaacatcctcgcgctcacctttaccaacaaggccgccgagcagatgcgcgaacgcatcgcgcagatgatccccgacaaccgcagccgctatatccgcatgggaaccttccactcggttttttcgcgtatcctgcgcgagaacgccgaccgcatcggtttccccgattcgttcaccatctacgaaccttcggactgcaagaacctgctgaagaccatcgtccgcgagctgaaccttccggacgagaaatacaagcccaacctcttggcttcgcgcatatcctatgccaaaaactgtctggtgacccccggcgcctacctcgccaattcggtctacgccgccgaggaccgtcaggcgcagattcccgaattcggcaacatctacaacatctactgccagcgctgcaagcgcaacggcgcgatggatttcgacgacctgctgctgcagaccaacatcctgctgcgcgacgcccccgacgtgctggcgcgctatcaggagcagttcaaatatattctggtggacgagtatcaggacaccaactacgcccagtacgtcatcatccgccgtctctcgcagctgcattcgaaggtctgcgtcgtgggcgacgacgcgcagtcgatctactccttccgcggggccaagatcgagaatatcctctcgttccagaaggattttcccgacgccatggtcttcaagctggagcagaactaccgctcgacccgcaccatcgtcgatgcggccaactcggtgatcgtccgcaactccaaacgcatggagaaacactgcttctcggagggcgacaagggcgagccgatccgcatcctcaaagcctataccgaccgcgaggaggctgaaatggtcgtctccgacctgcgcgacaagatccgccagacgggcgacgagtggtccgaggcggtgattctctaccgcaccaacagccagtcggccgtgctggaggacaacctccgccgccggggcgttccctaccgcatctacaagggcagttcgttctacgaccacaaggaggtcaaggacatgctggcctatatccggctggttatcaatccgcgcgacgacgaggcgttcaaacgcatcgtcaactatcccgcgcgcggcatcggcgacacgaccgtccagcgcatcgccgagctggccgccgggcgcggcgtctcgatgtgggaggcggtcgatacgctggtcgccgaacccgccgccgatcccgtgcagaagaccatcgcccgcaaggtgtcggatttcgtcgccatgatccgcggcctgtctctggcccgcaacgaaaagagcctttacgacttcggtctggagatcgccacccgttcgggcatcatcgccgcctaccgcaccgaaaatacccctgaggcgacctcggcgctggacaatatcgaggagctgctcaactcgatgcagctcttcaaggagcagcgcgacgccgagatccgcagcggcgaacggcaggaggacgaggaggcgaccatcgacgagtggctgcagaacgtcatgctgatgaccgacatggacaaggacgatcctgaggatcgcaacaaggtgacgctcatgaccgtccattcggccaaggggctcgaatacaaatacgtctatatcgtcggtctggaagagaaccttttcccctcgcagcgggccgccgagtcgcccgacggcatcgaggaggagcgccgcctgttctatgtggccctgacgcgcgccaaggtcgaggcgacgatctcctatgccgagatgcgcttcaagtggggcaatatggagttctcgcgtccgagctgtttcctgcgcgagatcgaccccaaatatatccgcgccgacttcgacgccggcgaggagcgtccgcgccgcccgcaggacggcgaaggcccctcggccatcgacgaactgcgccgccgcttcgactaccgcttccagcagaaacggcaggccgaccgtgcaggcggcaataacggcggtcagcagggcggcttcggcggccagcagggcggcttcggcggccggggcagcggcggcagtttcggcgggcgttccgccgacggccagtccggtcctgcccggcgcttcgcccgcgccgcggctccgcagggcgcgcgccctgcgggcagacccgatccggccctcgtccagacgccgcgcccctcgaccgacggcatgcgccgcgtgggcgtgcggcaggcggtcgacggcggcgtgcccgtagggccgtcgatgcccgtcagcggcgactacaccgtgggccagcgcgtcgaacatcccaaattcggcgtcggcatcgtccagcgcatcgagaccctcgccaccgaccacaaactggtcgtggccttcgacagcgtgggcgagaaaaccctgctggccaaattcgccaagctgaccaaactgtagagatgatggaaacttccccccccctcatttcagtctgcatgaccacctataaccacgcgccctacctgcgtcaggccgtcgagagcgtgctcagccagcagacctcgttcgacttcgaactggtgctgggcgaggattgcagcacggacctgacggcggagatctgccgcgaatacgccgcgaaataccccggccgcgtgcggctggtgacgggcgcccgcaatgtcggctggcgggccaactaccgccgcacgttcgatgcctgccgcgggaaatacgtggcctactgcgacggagacgactggtggaccgacccctgcaagctgcagatgcaggccgatctgatggagtccgatcccggttgcggcatgtgttatacgggcgccgacgaatactggcaggcggaagggaccttgaaatccgatcccgaccggcactataccgatttcgagcagatgctgctcggcatttcggtccccaactgcacggcgctggcccgccgtgagctgatcgcggcctactatgccgagatctgccctgaggagcatcccgaatggctgaccgacgactggcccatgtggctgtggttcgcctgccgttcccgaatacgcttcatagaccgcgtgacggccgtgcaccggcgcatggtcgggagcgtgagccacggagattcctacaggggacgccttgcgagccgcgattcggcgatggagaccagcctctggttcgacgaacgcttcacggcttcgcgcaaccgcttccgcattctgcgccgccgtcatgtggtgggactctggctgctctcgtggaaaggggcgggagtcggcgaatacctcgcgcgctggtgggccgatctgcggcggacgccgcggctcgtcttctgcccggagggggctatttttctggtgaagaaaattctttttcgacgtaaaaaacagcatttatgacgaccaaacaacgttacgacggcgtaatcgcatggttctcggagcatatgcccgtggccgagagcgaactgcactacaccgacccctaccagctgctggtggcggtgatcctttcggcgcagtgcaccgacaaacgggtcaacatgaccactcccgcgctgttcgaggcgtttcctacgcccttcgatatggccgcggccacggccgaggatatttacccctatatcaagagcatctcctatcccaacaacaaggcccgcaacctcgcgggcatggcccgcatgctctgttcggagttcggcggcgaggtgccgagcgatctgcagcagatgcagcgcctgccgggcgtgggccgcaagacggccaacgtgctgggcgcggtgttgtggcagaaggaggtgatgccggtcgatacgcacgtcttccgcgtctcgaaccgcatcggcctgacaaccaactccaaaacgccccttcagaccgagctgacactcgaaaagaacattccgccgcacctgctgccggtggcccatcactggctcattctccacggccgctatgtctgcacggcccgcgccccgaagtgcggcgagtgcggcatcgccgtgtggtgccgcaaatacgccgccgaccataaggccccgaagggctgaaccaccgaccgaaaaccctaaaaacttcaacgatatgacaaaaaacctcttccgtattctgttgttcctgctgctgcccctcgccgggcaggccaaagacgccgattcgctgcgcgtactctgggtcggcaacagctatacctattacaacgacatgccggccatcgtgcagcagatcgccgcgacgcagaaggtgaaggtctcctgcacgcgcttcctcaaaggcggcgaacgcttctccggtcacctgacgaatcagaaactgctgaaggcgctggccgccggcggctgggactacgtcgtcctgcaggagcaaagctccgcgcccgccatgccgacgcggcaggtcgcccgcgaggtctatccgcaggcccgcacgctcgacagtctcgtgcatgcgggttcacccgacgcccgtgtgatcttctacatgacgtggggccacaagaacggcaaccgctttccgattccggaatatccgcccatcaaccgctacgagaccatgcaggagcggctgattacgagctacctcgaaatggcctatgacaacgacgcgtggtgcgcccctgtgggcatggcgtggcgccgcgtgcgggccgaacgtcccgactgcgtgctctatgcgcaggattgtttccaccccgcgctgccgggcagctacctcgcggccaacgtgatcttcacgaccatctacggcaaaccctaccagaccgactgcacgatgggtcttccgcccgaacaggccgaatacctccagcgcgtagcccagcaaacggtcctcgaaaaccggacgctgctcaatctcgaataatccggcggccggattcgacggccgaacccggataagacgacaacggcggagcattcggctccgccgttgtcgtttataagtcgtccggtctctttcgcttcggttttccgtccttccggcggcatccgtccttttgcgcttttctgtttccctccggtccccgctttcccggccgcggtcggtttcccgcttttctcccgtccggtttccgttcttcgtttatccggttcttcgttctgccgcctgcgcccggttacccgttcttccattcgtgtccggttctttgcgcttttctgtttccctccggttccccgctttcccggctgcggctggtttcccgcttttcttccgtccggtttccggtttccgtttatcggggtcttcgttctgccgcctgcgcccggttacccgttcttccattcgtgtccggttctttgcgcttttctgttcccagccggcttcccgctttcccggctgcggccggttttccgcttttctcccgtctcggttctccgctcttccgcctgcccgttttttccgctctgttagcctgttctctgttttcccggcttttcgttctgcgtccggcgactaccgctcgctcagaaggagccaacgcatcgtcttttcgtcgatcagcccgatcagctccgcgatgcgctgcgactgggccgtcagctcgtccactccgagcgaacccgacgaaagcgactcctccagtgccgctttttcggcttccagcgccggaatctcccgctccagcgtctccagctcgcgcttttcgttgtacgagagtttgcgcggcgcgccgtccgccgcctgcgtccgcaccgcctgcggtttgggccgcgcctgcgcctcctgcgcgtggcgtgcggcttcgtattcgcgtttccacgccacgtattccgagtaggtgcccgtgaaatccttgatctcgcccccgccgcagaagaccagcaggtggtcggccaccttgtctacgaaatagcggtcgtgcgacactacgatcacacaccccttgaatgcgcgcagatactcctccagaatgccgagcgtcacgatgtccagatcgttcgtcggctcgtccagaatcaggaaattggggttgcgcatcagcaccgtgcagagatacagccgccgccgttcgccgccgctgagccgcgccacgaagctgtactgtgtttcgggcgtgaagaggaagtgctgcaggaactgcgacgcgctcatgcgccgtccgtcgcccaagtcgatctgttcggcgatttcggtcaccacgtcgatcacccgcttcccctcgtcgaactccagcccctgctggctgtaatagccgaagcggaccgtctcgccgacctcgatcgtcccgctgtcagggcgttcgatccccgtcagcagtttgaggaacgtcgatttcccgcagccgttgtcgcccacgatccccagtttctcgtagcgggtgaagttgtagttgaatttgtcgaggagcaccagctcgccgaaccgtttgccgacctccttggcttcgaatatcttggtcccgatccgcgacgccttgacgtcgagccgcacttcgccgcggctgcgcgtcgattgcaggcgcgcttccagctcgtgaaaggcgtcgatgcgcgaccgggccttcgtcgcccgcgcctgcggctggcggcgcatccactccagctcgcggcggtagagattcgtctcgctctcccgccgggccgcctgcgccgtctcgcgctcctgcttcttctccagataataggagtagttgcccgcgtagtggtatagctgccggtcctcgatttcgaggatgtcgctgcacaccttgtccagaaagtagcggtcgtgcgtcaccatcagcagccccgcgccgcttgccgtgagatactcttcgagccactcggtcatatcggtgtcgaggtggttggtcggctcgtcgaggatcagcaggtccgactcgcttatcagcacgttggccagcgccacgcgcttgagctgtccgcccgaaagggtcccgacccgctgtccgaagtcgcggatcttcagccgcgacagaatccgcttggcccgctgttcatagtcccacgcttcgagcgcgtccatgcgggccatcgcctcctgcaatccttcgcccgacggctcttcgatcgcccgttcgtattcggcgatggccttcagcgccggattttccgagtggaagcaggcctccagcaccgtcatctccgccggatagaccggactctgttcgaggtaggcgatcctcagatcgcggcggggtacgacctccccgccgtcgtgatcctcacgccccgctatgatgttcaggagcgtggtttttccggtgccgttcttggcgacgagggccacgcgccgcccgtcctcgatcgcaaacgatatattttcgaagagtaccagatcgccgaacgatttggtcaggttctccacctgaagacaacaagccataatgcgttttttttgtgtatgcaaagctacgcaaaaataccgaactgacaaccgccgccccgaaaccggatcgccggccgccggctttccggagtatggaaacgtgctatttcggtacgttcccgcggtcgcggttgcatatctcttctttttttgtatctttgcaaagatcatttagcgaaacagagccgaaatggagttatcgaaagagcgtctcgaacgcctgcgggaactgcttgcccccgcccatcagcagatcgtgatcgtgtcgcacaccaatcccgacggcgacgccgtgggatcgtcgctggcatgggccgaggcgctgcggtcgatgggacatgaggtgacgtgcgtcgttccgaacaaatacccctattttctcgactggatgcagggcatcgaggaggtcgtggtcttcaagaacgacaccgaaggtcgcgccgcccgcgccatcgccgatgcggacatcctcttctgtctcgatttcaacgccgtttctcggctcgaaatcctcagcgagaccatcggtgccaatacgacggcccgccgcgtgctgatcgaccaccacctttcgcccgacgagggtttcgacctttcgttctcgcatcccgattcgtcgagcacctgctttctggtctactccatcgtcgaagcgctgttcggcgcgcaggccgttacgcgccgcatggccgaagcgctctatgtgggcatcatgaccgacacgggcaatttcgcctattcgttcctcacgcctgagctgttccgcgccgtggccgtgctggtcgggacgggcatcagcattcccgacattcacaacaacgtctacaacgcctataccgagggccgcgcccggctgttcggctatgccatcaaccgcaagatggagattattcaggacggcacggtggcctacatgtcgctgctggagaacgagatgcgccgcttccagttccagcagggggacagcgagggcttcgtgaactacgccctgacggtcaagaagatgaagatgtcggccatgtttctggcccaccgcaagttcatccgcgtcagcttgcgttcgcgcggagatgtcgacgtcaatctcttcgcccgcaagtacttcaatggcggcggccataagaacgccgccggaggtaaatcgttcgtttcgatgcaggagactatcgcacactatatcaagtcggtaaaggaattcgccgacgagggccatctcggctgatccgccggagcggccgcgctgcggcggtttccggcagttctctgcggccggatttccggttgtcaatggtttcggcagaccggttgccggctgtcaatcgtcttgcggcgactttgcccgcccggtttccggtggtctgccgccttgtggcggtttccggcggtcaatcgttttgctgcggtttccgcctgctcgattctgccgcccggtttccggctgtcaactgtcttgcggcggtttctgcaccggatttttggctgccgatcgcctttgtagcgacttttgcccgcccgattttggctgcatggcttccggggcctgccgtatcgcttctgccggacccctgtggccgctgcggttccggtgcgctcgcggcagccgcctgcggttcccggttttcgggccgtcgtgcacccgaattccggccgtgaattccgccggttgccgcaaaagatgctgtctcattaatttggaacgttatggacgatttccgactcaaagtcttcattacggcggcccggacgctcagcttcacccggacggccgaacggcttttcatctcgcagcccgccgtcagcaaacacatcggcgagttggaatcccaatataaggtacagcttttcatgcgccgcggcagccgtctcgaactgaccggggccggggagaccctgctcgcctgcgccgaacggctggccgacgactaccgccgcatgcagtacgaaatgagtctctgcgccgacgctcccgtgggcgaattgcggctgggggccagcacgaccatcgcccaatacctcctgccgccgattctggccagatttacgacgcgctttccgggcgttcgggtcgcgatgatgtcgggcaacagcgatcaggtcgagcaggcgctcggcgggcacggcatcgacttgggaatggtcgagagcctgagccgccgtcaggggctgcactatacggttttcgctcccgacgagctggtgctggtggcccgcacgggcggtccctattcgcggaccgagtcgataacggccgatgagctgcgcgaaattccgctcgtgttgcgcgagggcggatcgggaacgctcgaagtcatcaaggcggcgctgggacgcgcgggcatccgcattccgcagctcaacgtggtcatgcggctgggctcgaccgaggggatcaaggctttcgtccgcaacagcgacgccatggccatcgtttcggtgatctcggtcgtggacgagctgcgcagcggcgtgctgcggatcatcgacctcgaagaccttcccctgcggcgcgatttcgcgttcgtgcacgtcgaagccgagccgtcggctctcgtccggcagttcatcgagttcgcaagggccgaccgttgaccgggcgggctttctggcgcagcctcgacgagcgtatttgccatgattccttcgccgtttctgctgtcatttctgccgcgtttccgcagccgctgtttctgccgctgtttctgccgccgttcccgccgtgctcgcgttgcggttccgggcttcgcttcctcccttctttgtgccgccgctttcgggggacgatctgtccgcttgtttttttcagtataactttttgttatggcatataatgatttcttgtttcatattccgctaaaagatgcgacctttgccggcggaataaagaaaaagttatagtgaccattttaaaaatacaagcatatgctggaaaaaggtaacagggcgaacaccctgcacggaattctgctgatcgcgctgttttcgttcgcggccttctacatcgccggctttcccatcgtaaaaagattgtcgttcagtccgctgatcgtgggcatcgtgctgggtatgctctacgccaacagccttcgcaacaaactgcccgaaacgtgggtccccggcatcaagttctgcaccaagcagctgctgcgctggggcatcgtcctgtacggattccgcctgacgctgaccgaagtggcggctgtcggcattccggccgtcgccgtcgatctggtcatcgtgacggtcaccattttcgggggagtcctgctgggccgtctcttgaagatcgaccgcgatacggcgctgatgacctcgacgggcagcgccatctgcggcgcggccgccgtgctgggcgccgaaccggtcgtgaagtgcgagggttacaagaccgccatcgccgtctccacggtcgtgattttcggaaccctctcgatgttcctctatccgctgatgttccggatggggctgctcgatggacttacggacacgggcgtggccgtctacacgggcagtacgctgcatgaagtggctcatgtggccggagccggcaatgcgatggacccgaccgatgcgctgggaatcgcggggacggccacgattaccaagatgatccgcgtgatgatgctcgcgccggtgctggtcgtcatgggcttcgtgctgggccgccggaagagttccggagcctgcagggagaagagcaagatcgccgtgccgtggttcgccttcggatttatcgggatcatctgcctcaattcgctgctgcaatacctgttcggcgtggagagcgtccgcgagattccgctcaacggcgcgatcgaatacgccgataccttcctgctgacgatggccatgacggcgctgggcaccgagacgagtatcgacaagttccggcaggccggggcgaagcccttcgtcttggcgggcctgctgtatgtctggctggtggcgggcggttatttcgtcaccaaatatctggtcggaatcttgtaaacagggctgcccggagtctccgctttacggtaatttcggcagcgtgggggcttcgtgctccgaatagccgagcaccgtctcccgtacgaagtccgcgaagccgcgggcttcgtcgtatgtaagggggccgggatagctcatcaggatcagctgatggggcgtgaagggtttgcggaacgaagggtggatgtactcgtaggggttggcgacgaagcccagccgttcgtagaagtgccggcggcggatcgagatgtcgtccaccggcgggtcgatctccagaatgacgcggccgaccttccggcagaatgccgtgagcgccttcgaacccatgttttgaccgcgcagggcgggcgaaacggcgagatgctcgacgtagcggtacgctccggcgttccagtggaacagaatgccgatgaactcttcgccgcgccagatgccgtcggcttcgaagcgcggatcgccgaacgcccggtcgtacccttgcgcgttccagcgttcgcagcgggggaacgactcttcgtaaaggtcccacgcttcggcccagcctttgtccgaacgggattcgaaaggtatgaattgcagctcctgtgtcattgtcgtcgtaattttgcgcaagatagtgcaaattccgcgcattgccaactcctgcggctctcctgcggctctcctgcggctctcctgcggctctcctgcggctctcctgcggctcttcgcgggcgttccggacggccgagacgacgaaaaagggatgcccggtccggacatcccttccggcgccttccggcgcgaactttttatttcctttattcttcggtttttcctccggtgacttcgtccggaatgccgtcgcagcgcacgaagacctgcacgtccgagcggtcgtccttggccgtccagaccatcgaggtctcggtgaagtcggtcacgatgtagcggtgcgcccagtcgcctgcgccgtagtcgtagctgccgcggatgaccgcacccagctccgcgtcgttgtcgatgacgaagcggcccgtcagcttgcgggtgccgaagctgtcgaggttctggtacatgacgtacttggcgtccttgcggatgaattcgatgtagacgaagctgccttcggcgagcggcgcgccgttccattcggccagctgccacgtacccgcgatgttgttgttggtcacctccagcggagttacgtacatgtcgtcgtcgcaggcgcccagcagcgcgagggccgacaaaagggccgcaaatctcaaaaatcttttcatatgacttgtttttatcctgtttcttattctgtttccccgaactcgatccacagcatgcgctgactcggcggcacgtccggtcccccgatcggcaggggagtccgccggagcggctgcggggctttggccgggtcgaagcggacgaccagatcgccttttgcgccgggtgcgagcgtcgccggttcgcaggcgaagctcaggccggtggccgcgaatccttcgtcgcagaccggggtgagcggtttgtcgcccgcattcaggcactcgatacgctcgctctgcaccttgtccgtgcggccgaagcggacggtccgctgcttgagccgcagcgcgcccatcgcatggggatagtcgtcgtccgtgcgcaccgaggccgtgactgcgccccggaggctgaggatcgccgtaggctccttgtccgagagctgggtgtagacgaaaatccgcctgtcgaaaacccccggatgtcccttggggcggtaggtcaccgtcacggcgccttcgccgcccggtgcgacgggctttttgtcccagctcgccgcggcgcagccgcaggtggtctgcacgcgggtgacgaccagcggcttgccgcccgtattccgccaccggaaggtgtagaccggggggacgtcgtcctcgccgatatgcccggcgtcgatcagcgtgcgttcgaaacgcatcgcttcggctcctcccgcggccgtggccggatgggccagactgtcgagtttggcgcgcgggacgatgcggatctgggcgcggagcggcgcggcggcgagagccgcccataacgctccgcagcagagaagcatgcgtgttatcgtcgctgtgttgcgcatcgttgcgggtttagagccagccgttgccgttcgcgaccttgcgcaccgtgatgttgaaggtgtgcgtctcgttgccgctcgacgtgatgctggccttggtcatgccgctcctgagtcccttgaccgtcagtttccggccctcgacggaggccgttgcgaccgtcgtgtcggagatcgagaccgtataggtcatcgtctcgccgccgaggaaatagttggccgggatggccgtcacttcgccgccgaggttgatgtagaggttggggaacgacacctgcgtgccgttgccggcaacggcgttgagcagtttggcggcgttcgcctgaccgacgcccatctgtccgcggtagttggatttgttgagctgcatgggctggttcagacccacgtcggcgacgtagcggtagtagaatttcatgccgctcatgtagtcgtcgatcggcgtggtggtctcataaagcagggccttgaattcgtcggccgtgaagtggcggcgcagttttgccgcgtacgacagtcccagcgccgcgacgcccgaaacgtgggggcaggccatcgaggtgccctccatgtatccgtagccgctttcgctgacgttgtagggcagcgtcgagaggacgcaaccgatctcgccgcgcttgtggtcgtcgtcgaagtattcgtaatagtagtcctgatcgccgcccggagccgctatcgtggtgcccggaccgtaattggtgtagacggcgggggtgtagtcggcggccgttgcggagacggagatgcagaagtcggcggcgccggggaatccggccatgggggcggtttcgttgccgccggcgaagatcgccagaccgccctcgatcggaccgttgggcgagcctgcgttatgtatgaagtactccagcgcctccttttcgagcggcatgcttttctcccactcttcctgtgtcttgaagcccggctcgccccattcgtagctgttggccagtcccgaaacgtagccccagctgcactgcaggatcacggcgccgttgtcggcggcgtatttgatcgccttgaccgtggccagcgcgttgctggccgtgctgcccgaaaaaatctggcacgacatgatcttcgcgccggggatgctgccccggccgccggcgatcgagctgatgccgatgccgttgtcgttctgcgcggcgattacgcccgccacatgcgtgccgtggccggtgtcgttgacgtcgtcccatgagatgacgcccgtgttcttgacgaagttgtagccgtagacgtcgccctgatagccgttgccgtcgttgtccttgtgcgagcggtagatttcgttctcgttgacccacatgttgttcttcaggtcggggtgctcgatcatcacgccctcgtcgaggacggccacgacgatcgactcgtcgcccgtcgagagttcccacgcctgctcgcactgcacgtcggcgtccacgatggatttcccgccgaacatgttgccgcggttcacgaggtgccactgctgcggaagcagcaggtcgtcgaagggataggccgaggcttcgcccgtccgggtcgcgcgctggtgctggatggcttcgagcgtcttgcgggagaggggcatcgcctttttcccggcgttgtaggcgcggtggatggtgcggttgaagctgacgtgctgcacttcgcccagcgccgagagtttctcggcgacctcggcggcggtgaactcctcgccgaagcggaccacgtaccacaggtgcagttccgattcgcgggtgcgctcctcgttgcgcgggtccacggggaagacgcgctcgatctcataaccgccgacgatgtccagaatctcatcgacggagagaatgcccgaacgggtcgcggggccgccgctgcgggtgatgcccgcccggtcgagtatgtcgcttacgtaaggtgcgaatttcaccagcacctcccccgattggtattcggccgggacgtccgggcccggagccggctccggggcggacagctcctctttggtacatgcggtaaatgccagtaaagcggtggcaagaatgccgtatagatagtttttcatcgtcataattatttggtcgtctcctcctcttcttcttccgtgccgggatctttcttgtatccctcgtagaattcgtagtagtagttcatgttggcgggttcgttggtgaatcctgccagcgtgccggtcgcatccttgccctcctgcgtgaacaccagcacgctgggcacccaccagtcgagcgccgggtggtagagcagccagtcgggcagttcgccggtcaggcggttgaggttgatggcgaaccgcttggtgtgcggcatcaccttcggggtgccgatcagcgcgcggggcagcgtgtcggcgtcaatgatgtcctgttcggtgtatttttcccagtcgtccatcttgggcagcggtccctgcaggtagttgaccgaaagcaacagcgtgtcgaggtcccattcgatcaggcggcgcgggaatccctgttcttcgacaaggccgccgtagttggtttcgatggtgttgctcaggtcatagatgttcttgcgcgtgttggcgcccatgttcagcgtccggagctttgggaagttcgtcggattgatctcttcgggaatcttctggaagttgttgctgctcaggtcgaggtattcgagattcttgagcgccgtgaagttcttgtccagcgataccagaccgtaggccgagatggtgagccggcgcagctgcgtgagcttggtgatgtactcgccggtggtgaggtccttgaggaaggcgttgacgttgctgtagaagctcagctcgtcggcggccgtcaggtactgcacctcgaaaggcagctcctctttggtgttgaacatgaagaaccgggcgtatttcacgcggcccttcttttcgggcgtgtacccctccatgccctcttcccagaggatcacgttgtcccagttgtccatgcgttcgccgttttcccagcttgcgatggtttcgagcgtacgggcgatggccagcagggcgatcgagtcgccgccgcgggtgttctcctcgatcggttcggcggcctgttgcgtgaccacgaggttgtcgtgccgtgcgagttcgacctcctttttggaggtgaaggtgacgtcggcgatgcgggggttgggctgcgaattgatgttccagttgaagcgcacggtcacttcgcgcgggcggatgccgcggtcgaattcgaccgccggcttctcgaacttgagccagttttcggccgattcgggaaccttgacgtagaaatccacgttggtctttatcttgacgtcgaagtggcgcgtgccgtacgccgcgtagttggcgacggtgacctccttgtcgtcgatgccgatgaggtagtcgaagcctttctgcgagacggcgatctcctttttgacccaagtgttctgctccatgatgcggattacgccgcggcggggctggtcggtcagggccgagtcgatgagtacgcggcattcggtcgtgccgcggccgttggcgggcgagacggtgatccacggttcgtcggtggtggcgacccactctttctccgccgacaccctgacggtgtgggttcctcccgtggcgggggcttcgatggcgtcgctgtcggtgccgaatccgacggtcttggcggcgtcggagcagccgcacaatgcgatcgagcagaggataaccggtatgtaattcgttattttcattgtcatttctccttagtggttattcgagcattttatcgcagttcaggatattctgggtcttgtcgtaaatcaggttgtaggcgccctgctgccagtagtagcagatcgccgaggcatcgaacgtgatgttggggttatcgctgatgtcgaggtggtagatcaggtgggagatcgtgtcgtcgatcttgcgcaggtcgttcgagccgatgtagaatccgcgcaggccggtgtgctggtagagtcccgtgggccattcgcgcaggcagcggttgccctgagcgtcgcgctggccgcggatggcgtagaccgtcaggcccgcgcagttgagcggcgaccacgggaacttgtcgaaggcgttgtacgagacgtccagcccgtagaggtaaggcagctgctcggccgtgaaatccttcggcagcttgctgagcttgttgtaggtcaggtcgagcgaggtcatcgaagtcgagtatttgccggagaacgacccttcggggatttcgtcgatcatgttgccgcgcaggatgatgtatgcgacgagcgatcccgtcgtgccgagacatttggggaacttcgtgaacttgttcgccgcgagcgagagctgttcgatgttcaggcccttgaacgtgccgtcctcttcgccttcgaagccgtcaatctcgttgtaggagaaatcgaccgatttgatggtgaacttgctcttggccgagaagatgttggggaacttcgtgaatttgttgtaggtcgccgagaaggtctcgacgtcgtccatggtgcagaaaaggccgttcccgtcggcgggcagcgacgtgagtttgttgttgtcgaggtagagctgcgcgggagccacttcttttccgaacggatggatggtcccgatctggttttgggccaagtccagcaggccgatcttcttgaggttccggaacgattccggcacttcccggagattgttgtcgcggacgtagagaatctgtagcttctccttcgcagggccgttggcgatggcgttcagacccttgtagacctcctcggccgaccactgcgagttgttggaaatgttgagcgagatcatctccgggagcttggcgagcaccatcgggaactgcgtcatcttggggcagttgtacacctcgacgtcggtcagcgacttgaggtttgccagctcgtcgggcagcgtctccagctcgccgttggcgacgaacaggtattcgaggttttcgagcttgccgatggccgggtcgatcgacttgaggccgttggtcagcttgccgtgcaccacgtcataggggcggatacgcttctgaagtccggttttgcggtcgatgatctcgtcctcggtatagttctcctcgtagagcgagatgcccggaatggtcaggttgtgctccttgagcgcacgggcgatcggctcggaggtctgcgtcggcgtgtggatcaggcggaggaactccttgttgcgctccatgcgggtgcgcttccgctcgctcaggctcttgtcgggcgcgatcgagggatcgtattcgagcaggttggcgtctttgtgcgaacccagataaagctcgatcagctgcgtgagctggccgatggccgcgggcaggtggccccggaatccgaagtcgctgagcgtgatcttcgccacgcggccattggagtgtacctccacgccgggctggatgccccacaggtcggggtccttgttgaagtcccagttggtgccttcggggtagttttcgccggagaaataccagttggggccgtcgagcgccttccagatttcatacagcgcgtagtagtcgcggatatactcgtcggcctcgtaaagcgtgacgccgaccttcgtttcggtggtcttgttgtcctcgatgacgaagtcgaggttcttgggccgcttgttgttctccagcagcagcttgttcttgtcgtaggtctcgtaccgcatcattttgtagctgccggccttgagcgaaagcagcgtgtcgcattcgagcgacgaggtctggtagccgaacgtgtcgtcgtcctcgtcgaaatggatcgagaacttcgtgggcagcatcttgaaggtcgtctgttcgttggtctcgccctgttttacggtgaggctgatgaaagcgatctcgtcgaacgtatactgtctgtttgccgcacgggtgacgggcgtctcggtgaagtccgaaaggtccttgcggatggtgaagcgcacttttccgcgcggttcgacatcgaccgtcaggtcgtggacctgcaggccgccggcttcgacgacgagccggtcgtcgaggggcatgccgttgtatatcagctcgtcgttcgcgttgtagagcgagaaggtgatgatctggtactgtcccgtcagcagccgcagcttctcgctgcgcaagccgaactcggcgctctccttgtcggaggccgagagcgtcagcgtctgggtgacggtcgtgccgttgcagccgagcgacacctgcaccttggcggcttcgtaaaggtagtcgagctggggtttctgcgcccggctgacggcgtcgtaggacgcctccttgtagagtttgaactggacgtatccgtagtcgagatcgcggttgtcgatgccgtcgtcgtcggaacatccgccggtgagggccgctgccagtgcgagaatcgccgctacgaaaatttttaaaagtttcatatctaaaaacctgttctgtatattctccataaattgtagtcgtatagaacgggtccccgccccttcgaacggggacctgtcgtgtgggtggtgtttagaacgcgggcatacagtaaacgatgcatttcatgttccagctgccgtccaagaactgcagcatgccgtagggagcctgctccgcttcgggtttggccatggagacctgaatctgcgtgtcggagaggggttcgtagtcgagccactcggcgcccgacatcggcatgagcatgatctgctggtagggcgagacttccagtacggcgttcgaaggttcggccgaggtgtaggtcagcatgtactgcggaactcccatgccgaggttctcggcgaacgaggcgagcaggtccgtgttgccgcctgcgaccgcttcgtagttctccttcgtgatctcgaccagcgtcgcgccgctcaccagatcgggcatggcgaacttcacttcgaaaccctcgccgccaccgccgatcggataattctcgtcgtagatgcactggatgagcgcaaaccggccgtcggcgtcggtgaagacggcgaatccgatgtgggcgataccctcgttcgccatcgagctgccgccgcacttgtccttggcggggtccatgtctacgatgacgccctccgcggtcttgcgtaccgagagccagctctcctcgccgctcatgggctgcaggtcgtagtcgaagaaggcgacgccggtatattcgcggtccacggtcagcgtcgattcgggatcgttcgaccactccttcgtatagatgagcttgtagccgtccctgacgccgaattcgccgatgtaccagtcgtcggccggcagcttctcgaaggcggcgccgatttcggtcatgcctgcggggttgttcgccgagatggagccgggattggcctcctgattgatggtggtgacgagatattgtttgtattcgtcgcggatctccgcgtcgatgagctgataggggtcggagatcgtttcggcgaccgctgcgggcagcgccagcaggtatgccttgcgagctttgccgccgttctcggtcacgcccacggtgaactggcgcgactgtacgacgtcgctgccgggcgtgctgtcccacggctcctcggtcagcaggatccatgcgaggtcttcggcttcggcgctcaggtagggggcgccccactgctgcgtgacctccgcgaagaggaagaacttcgcgccgtcgatgctctggacgctgcccatcgcgctgcccggaacccagtcgccgttcatgctgttgaaatattcggccttggtgttgaatttggtctcggcgctcatgccgctgacggagaagatgtcgcggcaggccggaatcgagatcggaatctcgtagctcactccggagttgttcttgtcggtgaataccagcgtctcctcggctccgtcgagcgggtagcgcgaagcgtcgccttgcaggcgcagttcgagctgcgcgcccggttcgccgatggtcttggccgggacctcaagccactccggcagtttgccgagcacccattcgaagttggcctccacgagtaccggcatcgaaaatccggtgcggccttcgggccacgtcagggcgacgttttcggccggttcggtgccgtagaggtaggtaagcccggtttcggtgctgttggggttgtagatgaagtcgccgtagtcgtccagctgacaggtgcggagcgtgaagccgcggtcgagcgtgccgcgcgtgatcgtggcgatgaccttgctctggccgcccatggtcagggtcacctcgcagacgcggttgtcgtcgaactcttccagttcggcggcggcgatgacgatccgggccgggcccgcgccgccgcgcagggtccagaccttctgcgttccgtcctcgatccagaaccatgcggccgttgcggtcgggacgcttgcctcccaatcctgattggggtcgatttcgatcgtgaaggtctctccggctccgatggtcggggagaccgcttcggggaagttggggctgggagccttgatctccttgtccgaatcggaacacgaagcggccgccagacatgctcccgcgagcagtgacatcaccaagtgtaaatagtgccttttcatatctcttgtctttttctgctttaatggatttagcgcgcgtgcggcgtgatgactccgcccggtttcatgccctcttcacgctggagccggtcggcctcttcgtcgctgacccactcgatgatgttgtagaagtggcccaccagaccgacgttctcgcccatgttctcgacgtggaccttgatccagagcgtgacgtatttctgacacgaattgaagtaggagtcgtagagcgggctgttggtgaccagaatcttgttgtcgccgaggatctgtccgaagaccgagccttcgtctgcgagtatctggttcttgtccatggtcaccagcggttcggccggatcggccgggtcgaggcggatcgtcacgtcgtagctcgaaaagagccagtcgtgaaggatgatcatgttctcctcggtggggtgcttctcggtgcggataagccgctggagcgaagtgttctcgatgccgggatactggttgaggaagagcgaggtcacgacgcaccagcccgtgaagtcgttgacgtcgtaggggcagctcttcatcatcacgaccttggtctggtcgtggtacagattccagttgacctgttcgggcatgaccagcttgaggatgaagcccagcgagtcggtcggctcgatgttgtcgtacaggccgcgcacctctacgttggcggcgcgctggccggcctttatggtgatggtgttcgaacgcagggcgtagtgcagcccttcgatggcgttgctgcccttgtcgatgatctccacgccgaacgtacggtcgtaatcgcacgcgacggtcgaggtgacgggaaccgagaagtattccttgtcctgaagcaccatgtaggtcgccgcagtgtcggcgaacatgacgaactcccggtccgaataggtcttgtactcctccttgcagccggtgaagagggcggcgaggagtcccgttgcaaataaaaccgtgataatttgtttcattgtttatggtctgttcgttgttgctatcggttgctttcgttgggcagaatctccgagccgggagactccagctcgtgctggggaatcggccatacgaagagcggattgtccggagtgatcttgagcgagctgccttcgggctgcgagcacgactgcggcgtgcggcggatgctgtagccgccgttcaggtcggcgtactccctgccccagcgcttgaggtcgtgcaggcggaaaccctccatgtagagttcgcgcacgcgctcgtcggagatggtctgcagccagttgtttttcgagacgttcagcgtgccgcccgaagcgtagcgcatcttgcgcagcgccgtgaggtcgttgccggccttcgtgaagtcgttcttgcggcagtaggcttcggcgcggatcaggtactgctcggccagccggaacggcttgggcatcgagacgtggaagatcagcttgctggtgaagttgcggttgccgtagtatttcaccagcatcggccagtccagtccgttggtgtagccgatcgtcagcccctgctccttgccggcgaagtaacccgaataacgcaggtcggcgtcgtcgtacaggttcagcgccgcggtggccggcacgtagtcgggatagtagtaggtgaggtccttggtgaagttcaggaacaccgttccgaggggactgccgtaggaggtttccgtgaagccgatgcgccagatgatctcgtagctcaggtcgtaggcccacatgtagtcgaagaaggtgtagtcggcgttgtacttggttttggcgtcggccagcttgaaggtgttcttcttgtcgtcgatcaggatgctcgcgtattcgatggcggtatcccagtcctgcatgtagagggccacgcgggcgtgcagcgcctgagcggccgccgaggtgatgtactcgttgctgtaggcgtcctcctccttgtcgagacgcttctcggcctccgccagatcgtcgagcacgaacttataggagtcgtacagcgacgcgcggcggatcggctccggcgtggagtatttggtgcggatgaccacgcccagctccgattgcgcggtggcggggtcgtaggccttgcagtaattcttgagcagctccgaatagcagagcgcgcggatggcgtagacctcgccggtgtattcttcgaggtcttcgaggttgtcgtcgctgatttcgttccgcatcacttcgtcgatgcgttcgaggaagaagttgcagcggctgatgacggtgtagaggtcggcgtaaacgccttcgaggtcgaggtcggtcgggcggacgtcccagcgccagaagttgccgaactggttgctgttgccctcgacggcatagacgaggtcggcctgaatgtcgggcagcagcgtgagccgtccgctgaaaagcgagctgctcttgaaggtggcgtagatgcccgtgagggtctgctcggcatccgcgaaggtcttcatggcatccttttcggggatggcggattcggggtatttgtccagacacgaagtggcgaggagaagcaccgcaagggcggaaagtcggaattttatattgcgtaacatgttcatagtcccgttttagaatgttaagtcgagtccgaaggtgaattgccgggccataggatactgcgcttggtacatgttggagttaccttcaggatcgagtcccgtgaatttggtgaacgtaaacaggttctgggcctgtgcgtaaatccgggcgcctccgatgaaccgggtcttgcgcagccactcctgcgggaaggtgtagctgagcatgaggttcttcagacgcaggaacgaagcgtcctccagcaggcggtcgtcgaactcggtgtagacgccgtggcgcggaatgtcggtgatgtcgcccggtttcttccagcggttgagcaggcgtttcgactggttgaaggagacgaagcggccgttcgactcgtcgaaatagcggtcgttgttgatcatccagcggtcggccacccaagcgaactgtgccgagagcgaaagccccttccatgtcagcgtcgtgccgaagccgccctgccacggggcgaagaagctcttgccggtcagcaccttgtcctcgtcgcggagttcggtggtcagttcgccctgcttggtgtaccacagggcgtcgccgttggcgggattgacgccggcgaagcggttgatgtagaattcgcccacggggtgtcccacgaccagcttggtgttggtgctggacatttcgtactccgtgacgccgttatagagttcggtgatcttgttcttgttgtaggatacgttggcgttcacgctccacaggaagtccttgcttgcgacgacggcgcccgacaggctcagctcgacgccgcggttgaccatgccgcccacgttgctccagtggtagccgtagcctttgtctgcataggattcgggaacctccatcagcatgtcggtcgtcttcttgttgtagagttcgacgtccagattgagccggttccagaagcccagatgcagggccacgttggtcgtccagagcttctcccagctcagctcctcgttgcccggctgggtgggggcgatgccggcgttgccgaaatagttctggccgccggtcaccagcgcgaggtgttcgtagttgggaatttccgagttgcccgacgtaccggtgctgacggcgatctgcgccagtgtcagccagcggcgggagttctccatgaatttctcgttgcgcaggttccacatgaagcccaccgaccagaagccggcccagcggttcgaggcgccgaagcgcgaggagccgtcggtacgcagcgagaagtcggcgtagtaacggtccgaatagctgtactcggcgcgtccgaagaacgacagataggcgtagttgtcgtcggtggtgtcgctccagcgggtggcgcgcggactcgacgagatgttcaccagtttgtcgttgttctggtccttggtctgcagggcgaaggcctcgtaccggtagtcgagtccctcctgccccgcgaggaaggtgaacatgtgcttgttgtcgatgtcgaaccggtaggtgatcgtattggtgaccgaaaggctcattccgtcggaggagttgcgctgtacggtacccgaaccgaggttgggggcgtagctcggataggagatgccgcggcccgtcgagtgcgaataatcgacgccgaactgcgaacggagcgtaagcccttcgatcggggtcgcctcggcgaagaccgtggatatgatcttgtacttcttgtagtctacggggttgttcttgagccattcgagcgggttctgcccctcgcccttccacgaaccgtcgttcaccgacgccagcgaaccgccggcgcggtgcgggttccagtagggaagcatgaagcgtgcggccgaaatcggtgtggtcagggtgtattccccgtcgtcggccttctcgatggtctggtagttcatcatcgtgttggtgccgagtttgagccacttggcggcccgctgctcgacgttggcgcggatcgagtagcgttcgaacgacgaacccacggccgtaccgtcctgactgtagtagccgcccgaaacgtagtagttggtcttttcgctggctcctgagacggaaagctcgtagttctggagcagcgcggcgttgctgaacacctcgtcgagccagttgacgtcggtcttggccagcacgttgtagttcttgccgtcggtcagccccagctctttctcatactggatgcgctccgaagtgttcatcaggtcccagttgccgtaggcgatctgcgaaaaaccgagttgcatgcggtagttgatcttcgcgcggtcggccatgcggccgcgcttggtggtgatgacgatcacgccgttggccgcgcgcgcaccgtatatagaggtggacgaagcgtctttgaggaccgaaaggctctcgatgtcggagggattgatggtgttgaagtccctgctcgaaatggcgacgccgtccagaatgtagagcggcgcggtgccggagttgatcgagttggtgcctcggatggccatggctgcggcctcgctcggctcaccggagtcggaaagtaccgtcagacccggaacctgaccctgaagggcctgatcgaaggccgccgccggggtgtcctcgatcttctcggccttgacggtcgataccgagcctgcgatggtgccctttttgcggacgccgtaggcgatcaccaccacgtcgtcgagcgtctgcgaatcgccttgcagcgcgacgtcgcaggtaacggagcttcggcctgcgggaaccgtgaattcgaacggtttgtaaccgatgtactggaaggtgagggtggtccccgccgaaacggttatccggtaggtgccgtcggcgagtgtgctcactccgctcgtggctccggaaatcacgttgaccccgatcaggggttgcttgtcatccgccgaagtgacgatgccactgacggtcacgtttccccccccctgagccatagatacggccggtaggatgcataggaaaagtgcaagaatgttgagtagaagtttcgttttttgcataagtggatgatactttcttacgcggcaaagaaaaataattaaaatgaatttgccaaatattcaaaatggatgaaatgtaagccggagtgcctgaaaagggctgtttcggtgctctgtccggtgtgtttatgcggtctattcgattcttaattaataacttaaggttttgtttcgatttgttccgatcgggttggataatattcaaaatatttttacaaaaatgtagaaatgagtttgcttattttgaaattttatcattatctgagcggtgcgcggtcggattccggggcggggatttagcgggccggaagcttcggaagcggaaaacgggcgtttgtttttgatatattttaagaaatggcctccttttgttgtccggttttaggaagccgtaaaaaaatgtcgaaatatttgccgaaggagggcttttcacccccgaaattgagaaaagataacaatttctttaattttgttaatcccgctttgcagggaacgagacgtcttgaaagcggtctgaaaggccttttcggaggtttaattaggctgaaacgggaaattttgtgccgatgcagtcgtttttaccggggctaaacttacggattgtaagcattattgtcatatttcatattaatacataacttttcaagcagaaatctacccaccttgcgaggaaacgttgctttatgctcccgattatcctgaaaattgattaaatttgattcgttatgcgaaaatggcgctacctcgccgccgaacaccccgccgtggtcgaacgcctgcgcggagagctgcgaaaattaggtttccgatttaaaaaataactgccatgaccctttcttacgacaaaatcctgcggcgcgcggcgctttgcatgctgatgctgcttatgacgggcgcctgctcccggcgcggccccgtgctcacgttccgcgaggcggacgatcctacggccgatacgctcgccgactggtcgggcgtcgcttcgggcctgcatgccgcttggggcacgaccgacaaacgttacgcccgctccgtcgtgccctgcgccgcggagtccgaatgccgcctgacggcatggcgcggcgaacgggtttcggcccagttggtactgtggagcgtcgacagcgtcggaggcgtggagtgccgcatcgggaaattccgctcggacggcgcttgtcttcccgccggaatcgcgcaggcccgcttcgtgcgttacgtgctcaccgacacgttcggtccgggctgcggccaccgcaaggacggcgatttccctgtttcgctcgcggccgacatgctcgacacgctcggccgcttcgacatggatgcgcgcactgcgcgtccggtgtggctgaccgtctccgtgccggacgacgcgccggcaggcgtctaccgctcctgcgtcgaagtgacgggctgcggcgtgaaaagcctcgaactgcccctcgaactccgcgtgcaggagcggcgtttgccccgccctgcggagtggagttaccacctcgacctctggcagcatcctgcggccgcggcgcgggtaatgggtctcgccctgtggagcgacgcgcacttcgacgccctgcgtccgctggtgcggatgctcgccgacgccggacagaaggtcgtcacggcgacgctcaacaaggacccgtggaaccaccagtgtttcgacgcctatgaagacatgatccactggaccaagcgcgctgacggcacttgggtgtacgactattcgctcttcgaccgctgggtcggactttgcgccggggaggggatcgaccggcagataaactgctattcgatgctgccgtggaacaacgaactgcactattacgatgcggcggcggaccgcatcgtcgaggtccgggccaaccccggaacgcccgaattcgaagcgatgtggggaccgttcctccgggatttcgaagcgcacctcgacgcgaaaggatggctcggcaagtgctgtgtcgccatggacgagcgctcgcccgaaaccatggatgcggcgatcggcctgctgcgcagcgcagctcccggactgggaatcgccatggccgacaaccacgccagctataaacgctatgccgatctggacgacgtctgcgtgcagatcgactgccgcgtggctgacgaggacctcgcccggcgccgccgcgacggactgctgacgacctattacgtctgctgttcgtcggcattccccaatacgttcaccttctccgagccgtgggaagcggtctatatggcatggtttgccgcggcgtgcggctacgacggcatgctgcgctggtcgtataactcgtggcccgccgaccccgtgcgcgactcgcgtttcacggcatggcctgcgggcgacacctacctcgtctatcccgacgcccgctcgtcgatccgcttcgagcggctgcgggaggggattcaggattacgagaagatccgcatcctgcgcggcgaactggcctcggacaacactcccgaaggcgccgcaaaacgcgccgaactcgaagccgcggtgcgtcccttcgaagcgcacgaccccgcacggccgtggcccgacctgctccgcagggccaaggagacgctcgcccgcctgagcgaatagctgcggtgcgtagacgaatcgggagaggagcttgggggcctctcccgattttttaccgctttgcggtctgcgctgtgcggcggaagagcccctccccgttgttactgccgatatccggccggatgagggccgtcgtttcaaattcagaaaacgccttacggttatccgtaaggcgttttctgaatttacattgtcatgcgggcgtgctggagtcgtgaattcgacttctcctctccctcgcggcgggggcatgaaagaatccgaatccggcatgctaatttttcggtgcgtcatgatccgtgaacggcatcttttcgggatttgctccccagttgcggttggggcgcggacccatttgcaggaagagcgttccgccctgctgcagctcttcgtgtgtgaaccacgggcggtcgagcggcctgccgttgagcgtggcggactggatgtatttgttttgtgcggatacatccggcgctttcaccgtaaaggttttaccgccgccgaggtcgattgtcgatttttcgaagagcgggcatccgatgtcgtagaccgggcgtccgggcgctaccgtgtagaagcccatggcgctgagtacgtaccaagaggccatctctccgtagtcttcgtcgccgcaataccccagcggaccgtctccgtaccatacgtccataatctgacggacccggcgctgggtcatccatggctgtcccgcgtagttgtagaggtagggaatgtgtcatgtaatctcgttgccgtgggagtacatgccgatccaccccgtcatgtcggggtattgtttcagaaaatcgtatttctgatagagggggacgttggtttcgaacattgtctggagcttgtccgtgaatttctcccggccgcccatcaggccgatcagcccttccacgtcatgggggacgtaccacgtgtagttccagccgttgttttcggtgtagaactcccgtctgccctgtcctcccgaccagatcggatcgaaaggttcgatccagcggccgtcagccgtcttggggcgcatgaatcccgtcgcggtatcgaagacgttctgataattgagcgcccgtttcaggtagtattggtaatcctcttccttgttcagctctttggccaagatgctcatgcaccagtcgtcgtaacagttttcgagggtgatggccaccgattgccgcccgaatcctacctctttgacccattccggctggtcggagggcttggccgggaagaatcccttctcccagtacaccttgtcgagttcggttccccgccagtcgttcgtgctggggcgcgagagcatggtcgcttctttggagttgcgtttcatcgcttcgtaggcggtttcgatgtcgaaatcgcggtatcccttcatgtaggcgtcggtgatcgtcgccgtttcgtggcggccgatcatattgcggaaccctccgctgttgaccaaccagtcgccctcctgctgcatccggacgtaggagcgcatcaggtcgttctggatttcaggctcaatcaacaggcataacgggaagagcgagtggtgcgatccccagttggagccgaccttgtagaagttatggccgccggtttcatgcacctgtttgtcgaaccggctgtaatagcgtcctccctgttcggtcaggtcgatggattggctgcccagcatcacgcggtagagcgccgtatagaaaatggttttctgccgctgcgtgcctccttcgactctgattctgcccaaagcgtcgttccagattttccgggcgtcgtttttcgttttttcgaagtcccaatccggaatttccgccgtcaggtttttctttgcctgctccatgctgatgaatgacactccgattttgaccatgatctcctcatcgcgggatgtcctgaatgaaacgcaggcgccgatgcgctcgccctcctgaaagtccttttcgcttttcgacgaatcgttccaagtaatggccgagctgaacggtttgctgaactctgcgtagtaataggccgtctgggtgctgtccaccgtctcggtggattcgatgcagttctgcccggcgattcgaatcgtccggttgttgttgatcaggatattggcctgctccgactgcgggaagcggaacttgtagaatgaagcgtgttgcgagacggtcatcgccgcgtcgatgtcgtaatcttcgagcagcaaccgggtgtaatagggggttacggtctcgaagtcgtgatcgaaaccggatgcgtattcttccgcttcgactgcgggcgtgcccgtcgtggccatgatctctgcgagcggcttggtggcgtaacggggcagcgcgcggatcgagaagccggagatccggtcggccagatatctgtcagccagcggcggatagggattctgcccgacctgcaccatgccgtggggcagctgggtcatcgagttggtggcaacgagcaggtggccgatcgttcccgtgttgggattgacgtaatcgacaggctcttttcgggccgattccacgcacgagaccagaccggcgagaagaattgcaagacaatatgaaaagagtggtttcataaatggtggttttagttgagttcaggtcttgggcttagggccttttttcccggatccggtcccggataaactggccgtagggctgtttgacgttggtgaaccggcatgccgcgcagctgcccggaacgagattgtccgccgtgccttcgccgtccgagaagttccatgtcgcccagctgactctctgcttgcccggattgtcgccgtccatgatttgtatccatcgctgcgaggagtccagatcgtattttcccgaaccgttgtactcgcaggtgccccattcggtcacgaatacgggcagacggtcgaggtagttttgcaggttgtcgtagttgtagtgcgaagcggcgtaaaagtggtaggtgtagaggatgtttttgtacgtgagcgggtcttttaccacgtcggtgaagtctgcgctccacttgggcgtgccgcagatcaccacggcattcggagagttggcccggatgatcggaatgacccgttctgcgtagcgtttgaccacggcccacgtcacctcgtcgccgttgggttcgttgcagatttcatacagcacatggggtttgccggcgaattttttggacgcccatgcgaagaaatcgtccgcagtgtcgtatttgggatcgttcggatcgcccggatggagtacgtgccagtcgatgatgcagtacatgccgtatttttcgcagtaaccgaccagcgtctcgattttgttgcggaacttgagcggatcggtgttgtagccgttctcctcggcgtagagcgcgagccggacgacgtcgcactgccactcttcggccagcgaccggtaagcctcctcggtctggcatttgccgaaccattgaagtccgtgcgtactcatgccccggagttgtaacgctttgccgttttgggcgcataattggatgccggagactttcagggcgccgtatttttcgacgggggtgttgcccgactgcccgtcttcattgttcggggagcaggagaatgcggctgtcaacgctatcagtgacagcagtttgtagtttttcatgggaattattcgatgtttaggttaatattgagtaaatccttttccaaggacgatccgccgaccatgattttgtagtctcccgcttcgacgacccaatccatgtcgttgttatagaaggccagtttcgaggcctgtaatgtaaaatcgaccgttttcgtctcgcccttggccagtttgacccggcggaaatccttcagctccatgaccggccgcgtcacgctgctgtacaggtcgcggatgtagagttgtacgatctcctccccgtcccggtctccgcagtttttcacgtctacgctcaccgtgaccttgccgtcgccgggaatcttgtcctgagacagcctgaggttggagtaggcgtagcgggtgtagctcaacccgtagccgaacgggaaaagcggcgtgctttcgccgatggcataggggtggaagtacatcgacggtttgtggttgtataccatttgtagttgtcctacgtggcggggaatggttacggggagcttgccgctgggattcgctttgccgtaaatgatctccgctaccgcccggccgccgaagctgcccggctcccaagcctcgatcagcgccgcggcgtgtcggacgatccattccacgcccagttggcggccgttgatcaacaccacgatgatgggagttcccgtttcgataatacgctgggcgagttgctggctgagtcccgccagcgcgatgtccgaccggtcgcaatcctcgccgcaggtcttgtcgtcccagttgttgcgcagcgaatgttcgccgattacgacgatggccagatccgatttccgcgcggccgagacggcttcgtccactttggaccggctcattctgcggatgttccacccttggtcgataaaggtgaatttcgaggccggcgactgctcttcgagtccttccagaatggtcgtcacgttctcttcgggctggggcagggcccagtcgcccaagatggtctggttgtcggcgttggttccggttaccaaaacccgcatggctttggacgcgtcgagcgggagaatcccgtcgttggtcagcagtacgacggatttgacggccgcctcgtaggcggtggcccggtgtttctcggtaaagacgctttttgaggtctgctccgtgtcggtgtagggattctcgaacagccccagtttgaacttcgcggtcaggattttcaggcaggcgcggttgacggcgctctcggacactgcgccctctttgaccagttcgatcaccttttcgtagaactggggaccgtgcatgtgcatatccatgctcgcatttaccgactgccggaaggcgtccttgttgtcggtcgccgtgcggtgcaggtcgtgaatatgttcgacgtccatccagtcgctgacgatgaaaccttcgaatccccactctccgcgcaccacgtcctccatcagccagcggttcgagtggcacggaatgccgttcagctcattgtgtgccgtcatcatcgagtaggctccggcgtcgatgcccgctttgaacggggggaagaatatttcccgtatcgtgcgctccgagaggtccgtgggcgaaccgttggttccgttgacgggctggctgcctcccacgaagtgtttcacgcaggagagcacgcgccccggttcggaaaagtcccggccctgatagccccggaccgatgctgcgcccattacggataccagataggggtcttcgccgaaagtttcgcccacgcggccccagcgcgggtctctggcgacctctacgttggggttgaaggtccattgcgacccggtggcgcgcatctcggcggccgtctcctcgcaaatccgctctacgagttcggggtcgaacgtcgatgcttgtccgatactggtcgggtagacggtgcatccggcgacctgcgcgttgccgtgaatggcgtcgattccgatgagcagcgggatttgcagcgggctttggcttgcgagtcgctggagataattggcctcctcggccgtcagcacatgcaggaaggagccgatcttgccgtcgcgggtcatctgctcgacgtcggccgtggtgatgcccggatagaatcctcgcgccgtgttgttgtgcagctcctcttccgtcagctctttttccgccgatttcatatgctccagacctacccactggcacatctgggccaccttctgttcgagggtcatacggctcgtcaggtcttcggcccgcttctccgccggctgggcggggtccttgtaaagcggggcgtctccgcccgaacagcctgccagcgcaagcagcgggatgataaaaatgatcgggtttttcatagatcggttgttttttcaggtattcgattgatgggatagtatttgctccggacttcggtcccggagatggtgatcactcttatgccggacggggtgtggcagagcggtttgcccgtcgcggccgtcgtcgtcatttctatgccgttgtaattgccctgcgcttctccgtgcaggtgtcccgcgtagacggctttcaggccgccccgttcgaacagctcgaaatagctgtgtctttgactcctgccgattacgggatagccgtccgtttcgtctatttcgtgcaggaaaaaggggtggtgggtgaaaaggatcttgacctttgcgtccgattttccgagctgctcttcgagccatgctttctgggcgggttcctgctccggatcgcagtgcttgatgtacgaggagttgatgcccagcagcagattccctttcagcgcgagcgcaaagcggtcggcgccgtaatgctctttgaaaacggtgcagtcgaccttgtcgccggagatcttctggtcgtggttgccgggaagacagacgaccttgatctgtttgtccaccccggagatgaccgagtcgaacgccctccactgctccgcatcgtcataccggttgaccagatcgccggtcactacgaccagatcgggtttcagccggttgattcgccgtacggcttcgccgcatgcttcgatttcgcgggtcatctccctgttgtcgctccagtaaccgaactgggggtcggataactgtacgatcaccgtcttcccgccttcgggcttcacccccgattcgaacgggttggggacgctgctcatggtgagaactatgtgcgctccgtctgcgatttcgccgtgacggagccacgctctgccgagggagcggccgttgagcgtgacggagccgatataacggttctccctgctcaaccctttggcctcgatgacgatgcgggcgccgcgttccgtcgtcagtacggagcgttcgaattgcggactgacgaggtaatagagatcctgccccgcattgggaaagagacccaccgaggtgaagacgtaccacgcccccatcgcgccgctgtcctcgttgccgggatagccgcgctccagcgagaactgggtgtccctgatctgcgcaacgtactttgaggtcagatcggcccgcgagcagtgggtgaagatatacggagcgaggaatccgggctcgttgttcaggtcgatcagtttgcggctgaacccgtgttccagtctttcgaccgtccggcgcggtcctccgcaaagctcggcgagccggtcgaactgatggggcgcgaaaagcgagtaaacccatgaatttccctcgtagaaatattccacccacgagccgtatgtttttttcgggtctatggaaatccattggccgttttccttccggggggcgacaaaccctttgaagccgtcgctttccagcgaggtgtcgaacagcttttcccagctgcaggacctttgcgaaagcatccgggccgtttcatggtcgcccatgccttccgccatgagcgaagcgcaatagtcgttgtaggcgtattcgagcgcggcgctgcaactcatcggcgatccggtttcgggttgccatcccagtctgaggtattcgtgtgaccgggtgttgagcgcatggaatcggacgatgcggtatgcccgcgtccagtccactccctcgacgcctttgagccatgcgtccacgatgacgttgtccacgtcgtcgccgccctgtttggcttcccattccagcgaactcgtgtaggtcggctgacatgccccggtgcgttcgaagcgttcgatgaaggagttgatgctccgcgccacgtaactctcgttgaggagtgtcatcagcggatattttgtccgccacgtgtcccatatgcagtagtggtcgtccatgtgcggcgtgtcggaatcggtatgggggttgtcgccggtgcggtcgcgggccatcagaaaactgtggtacagcgccgtgtagaagattttcttcgcggtttccgattccgtgtcgatctgaatcgagttcaggcgtctgttccacgtttcgcgcgccgcggcttttactttttcgaaatcgtggcccggaatctgctcggcgaggaatttgcgggcgttggactcgctgcgcagcgatactgcgatcttcagcagtactgtgcccggcgcatcgaacggaggaagtgcgattctggcgtacagtttcccgtcgccgtcgtctgtgacggccaccgagcgcggcgcccggtccagcgccgcggcgaaatagactttgtagggcgctccgcttccgaatcctccgcggtagcttccccacccgccgatgattccggtttcggggtcgtatgagatcgctccgccgagaaatctgccgccgatttcgggtttgatatgctggggaatgttgtgggcgatgtcgagcaggatgttggcgtcttccgcagcgggaaagctgaaccggtagatcgcggcgttgtgggtcggtgccagctccgtgcggatgccgtatctgtccagagtgaccgcgtaatagtacggcaaggcggactctcccgatttgggagagtcgtggccttgttcgtccgctgaaaatccgacctgcggcgagagcagtatctgtccgtaacgcccccatcccgttccgcttacatggagctgcccgaaaccgcggatcggttgcaacggatcatatccgtcgttcccgcctccgggcgtttgcggggagggattgaccgacccgtggggcagctggggacctatcacgcaattgctctcgccgcggttccccataaacatgtccacgtaatcgactggctgtacctgcgccgaagccgtatgcacggcaagagccatgcatacggggatcagcgatcggatgcggattttcattttcatggggtcttatcagtctgtctcggcggttacctcgatgttggcgctgcggctcgtcttgtgatacgcggtgctgacttcgagacggagtttgtagctgcccggttcgttgaacgtgcgggagaactgcgttccctccccgactttgacgtcgtccagataccatacgcccgtcgtgtattgcgagggtgcgaactggagggttatggtcaggtcttcccctgccgtgacattgtatacggcgggattgcccgaaggccactgtccaaggatcgtggggaacgtttcctcggagatggtcgggtcggagtgctctttttcgcaggaaattattatcagcggcagagccagcagcatcaataacgctatttttttcatcgttctctttttattattttaataagtactgtttttgtcccaccataccggcttggtccagtcgtccctgcctccgagccgttcgatggcttcctgataattgaccgcattgtaaaggctttcggagatcggataactcagccggcgcggcatcttcccgtccttcgcgtcgcgggtgtaggcgttggacggcggggtgagtttggggaatccggagcgtcgccagttggcgaaagcttcgaacggattggtcaggtgaaggatccacagctgcatgttgatctgctccacttccgttccggccgtcagcggattggcggccagatagctgtcgatctccgactggggaatggccagcgccttttcgtcgtatattttcaggaatctgatggcttcgtttacgcctgtattgtaaagatcctccggagtttcggcgattgcggcgatgttccagcgcaccttggcttcggccagcaggaagcaggtctcggcgtaggtcatggcgatgccgggggtgttggttttcaggaatgcgttgttgagctggggatggcagcttcctccctgcacggctaccgattcattgtaggcctccttgatcgtgctgctggacgccatcagccaaggccagctgtcgtaccatgcgcgccctttgggaacgggtacgaagtagcgagtcgttcccgaacccgaaacctgcttgttgtacaattcgtcggtcaggtcgatgcgtttgaacggctgtttctgggcgtgggggtcgtcatggtagtagagccggctgattacgaaggtgcgcgggtcctttttgctcgatttggcgtattccggcttccagttgctgccgagtttcttgccgtcctcgaagttgatgttgtcgttggattcggcgcggccgtaccacatgtagttgaaaagggtctcgcacaggaacggcgagggcgagttgtctaccgactgccatatctgggccaatgcgttgcggcggtactctccgtgtccggtgtcgtaaatgtccgaaaaagagttgaacatggcgatgtcgccgctggtcatcacgccgccgacgttgtttatggccgcttccgcctgcgtgcgggccgtattggcgtcggcctgaaccaagcgcaaggccaaacggagtcgcagggagttgccgaaccggcgccatttctgatagtcgcccttgaagatcaggtcgccgtccgcactgccgccgtcggcgctgagggctttgacggcctcgtcgagttcgttgaagaagtcgttgtagatatcctgctgcttgtcgtatttcgggtagtagtctttgctgaaataggcggtgccggcagcgaagtagggtatgtcgccgtatacgtcggtgagaatcgagaaaaggtataccttgaagatacgggcgatggcgttgaggttggcgtagccggcatcaccgtccgtccggctcaccagatcgacgatgttcttgatctggttctggtacatgaagttccacagactcataatctggaggtccctggtttaagcccaggctggtctacattgaaaatcaagcacttacagagtttctgtaggtgctttttcttttacaggtgaccttcaggtgacctttttgaagcgaaactctgcaagagtgaccttttgaaattgcatgggattgcagagaatttttatagatttttattctatggtgaacttgacactgcggaatgtgatgcacattttaggctgaaataggatttcccactaagcatatttgtaagtcgttgaaaacatctttggtatgggaatggccaatctgcaagctttccagtctgtccgttttcattcgtatattccattttggtagtcgcgcaaatattgcgtaaaagtctttcctgtttcacgtttaaagaaacgcatcagatgactcgggtcggagaaatgaaactcttcggccagctggttcacgtttcggttagcaaacagtaactcattcttcaattcttccaacagacgctgcttgagcagatgattggcagatacaccgaattgactcatcacggaactgtttaacgtaatacggctcacacggagcatatccgcatattcctgcacccgctgtttcgtacggatattcttttccagcaagtccttaaactggaatgcgtaattgtttttaggtacatcaatcggtaaatgataagtggcggcatacgcccggttgataataaccaataagtagtaaagcacagatacaatgagattataagtatcggcaacaggatgcagaagctcctgctttatgattcctaaaagacgaatatactccgccatgctttctggcgaagcaaacagatagggaggcgtgtcggtctgataataatatagcaagcgatacacaaaaaacttgtccgctatgaatgtacgcataaaatcctcgcggaatataagaaaagagtaatctagttctgcttcatccacgtgccattcctgctgctgatgcggcgagaggagcaataccatattggcatgcaattcaaatttgcggaaattcagcagcagatacccattggccttacgaaaaaaatagaagctaaaaaaatctgttttaaacacctgattttccgtcagtacaccacatacatcgctactgtagcctgagttgatataaaagtccacaccacagcgtgtcttgctaaaaggaacgctgaccagacgttcggggttgacgattttatccatagatttcgttttttggggcaaatatactattttttatttatcaaaatggcatatattcctgtttttaaggcataatgcatccgattttttttaccgaactttgcggctataatcaatacaataaattatgatggaagaaatagtaacaattcgattgatccgtaatgcaacattgcgaatccattatgctggaaaagagatacttgttgaccccatgcttgccggaaaaggcactttacagtcggctctaggtgtgtataagaccccaagagtacacctcacgatgccgatgaatgaaattgcggacggtctggatatggtattgttgacacacaaccatattgaccattacgacccgacagtgaaacagcatttagcgaagaacatcctgttcctgacacaaccgcaagataaagagagtattacacaggatggttttacaaatgtagaaagcattgaaaaagataaagctattggaaatttaaccattcatcgcatccaaggacaccatggcttcggaaagattggagaaatgatggggccagtatcaggctatgtacttactgcacacggtttccctactatttatataatgagtgactgtaaatgggaagactgtatccgtcaggccattgaacaattttctccagattacatcatagtgaacagtggaggtgcaatttttcctgaattttctcaaacagaaggttctatcattccagatgagcaagaagttatgacaatgctcgatgaacttcccgcccacatcaaactaatagcagtccacatggaagctaccgatcatgggcagactacacgcgcaattctgcgtaacgaagccatgcatcacaaaatagaaatgagtcgcctgattattccagaagatggagaaacaataatattatgagcgacttctctgattgggaaacagcctgaaaagagggttacgaatggattgttataggaacggaaacaggcaaaaggaaagggaaagtagatgccaatcctgaatgagtacgtcatattgtagaacaggcgaaaagaaattatattttggtatttatgaaagaataccttttgcctataatgggagaataccgaatgattcaagaactaccgaaacaatttatagaaaaaatatggaaaaggaaataatcagagaaatagatgtacagaatgtcatgactaaatcctcattaccagtagggggcttctctgtcaatccttatgtaggttgtcctcatgcttgtaagtactgctatgcttcattcatgaaacgttttacagggcatacagagccttggggtacgtttctggatgtaaagcattggaaacctattgataatccgcataaatatgatggacaacggattgttatcggttctgtaacagacggataccatccgtatgaagaagatttttgcagaacccgtaaactgctggaagagttaaaaggcactaatgctgaaatcatgatttgtactaagtcagatttggttttgcgtgatcttgatttacttaaaggctttcagaaagtgacagtatcttggtcagttaacacactcgatgaacagttcagatgtgatatggatcgtgccgtaagcattgagcgaagacttaaagccatgaaacagatctataatgcaggcatacgcaccgtgtgttttatttcaccgatttttccaggaattacagatgtgaaagctatcgttaatcgggtaaaagattatgcagatttgatatggctggaaaatctaaatcttcgtggacaatttaagagagacatcatggggtatatacgggaaaagcatccggagcttgtagccttgtatgatgatacctacaacaagaaacgaaaagattactggcaggtcttggaacaggaagtagctgcgtttgctcaagcggaaggttatccttatcgtataaacgatttaccatacgggcgttctcaaaaaggaaaacctgttatagtaaactatttctatcatgaaaaaattaggctaaaaaaataggatcatttgattgatttgataaatttactgatagcctgtcttgtcatttgtttgaaaaaacgcatcaggtggttaggctcaaagaaatgcaaacgataagccgtctctttaactgacaatctagaaaacaagagatcgctttttccctcttgcaatagacgctgtttcagcaaaagagcggaagataagtcaaattcacgcataacggtagtgtaaactgaactgtatcacggctctgtttacactaccgaatttctccatgattgaaagtattcctccaaaaggagtgagtttctctgatttaattgccatgtcatatagttcttatctacgtattcctacctgattttgttctattttccaatcataagccccattagcgacatcagcaacctccttgtaggtctgccgatgttttattttatcaaaagactgtcggctgtccgcatagtcgcaaagccatcttccgattgtttgctgctgctctttggtcttgccatagctctgcatcacgctcttgatgtcagcagcttcatcactgccaaagatagacttgtatttgtccgtgctgtagtgaataattgcatcaatggcacgtttgaatacctcactggcagcatagagcatatcggcaataatagcaaaaaccagcttgcgtgaattcaactcaccttgcaatcggctgatggtcttgtctttctccgcattggcaagtctgaccgcattattgatgcgcagttgcacattttcgtttagactgttaagttctttaatagccttgtcacgttctgaagcaatagaacaactttgcgcaatgacattatcacgttgcgcttcggctttctgcttttccaaagccagttcctttgtctgcttctccacctctttgatgacagtcggcctaaacgcctttttaaggcgatcatattcctgtgcgagcagcttgtactccatttcaagagtggcagtcttaccaataccgaccagactgccgacactatccaagataccgtccaccatgtttctgcggattgcatcacgctttttctgcttgtcggctatctcgctgtcaagtgccgcactccgttcagatttagccttattctcaacctctatggagttgcgctcggcttcggctttcgctttggcggtgacagctttttccttttctgctttagcttgctccgcttcctgcttctgcttggctatgatgaagtccgtcctttccaaatgcttcttacctgtaagatcttttgatatacccctttccatctctaagcactcagccaaaagcgtctgcatctcgcccatgcatttctcgtccagtttgcaggattttccagtatcgtggttcatccaatcccatacgatatgggcgtgaagattgggcatccatgtggcggtatctccgagattgccgtaatgcccctcgtcacggtggatgaagatttgcaaagctgtgataccccaatgctccttacactcctcacaaaaatgctgcaactgctccaacgtggtatcatctttgattaccacgacaccctctttgagtggggtgctgccacgcacgatagtcaccttgcccgtcttcttgttcattcgttcacggtctttggtctgcattttccgaccagtcttttccttgaccatttgggcaatctgattgtagcggtcagttaatgagctgttgcccaattcaggtgctacccatacttcgtttgaagccataaggtcagtacggacataaagcctctctttgttgatatgagcgaggtattctgctgttcttttgttatgtgcctcactactaccaatgttacagggtttgatattaatggatgttttctgtgccattttacttatgcttttagagatttatattaaaaagggttattagggcaaagccttaatcggagggtgcagggagagggtcacttcctgctcggggttttcaggggtgaagcctctgaacggagtttccaaagagagggtcactctttggtcggattgcataggactgacagtccttgccgggttcttagggcagcgtcctaagtgggacggggcaacgcccagccactcgggagagcccacaacttcgggagcaaagtggagaagttataatgggctatatcagggcaagccctgtcatgtacgccacacctctttgcctccagccgccaagtcagaatttgtttcttcccttttgttggaatgccatgcttttgttcatcagatactcgttgagatctttgtattcttcatactcatttgaggcatcagtacacttgtctcccaatgctttcattatctgccaggtagccattctgccagttttgtcattatccaagtggcagcatatttgagaatacttattgagcatggagagagcactcgggatgtttacaatggagttgagtaccaccgcatcacattcgccatgtagtatgagataggagagatagtccacgaatccctcgaatatgtgacaagctgtttcgtggttccttatcgtagtgattgctttcggagcaatacatcccttgaagtatggattccgaagttcatagccaccagcatcattcttgaagccaatagcaaaatatcgcttgccagcacttttgtagtgtatttccacgcactgccttttggctgtaatagaaccaattccccttcccaagaggtattgtagcaaagcaggatgagccagttcttttacctcaatatcttcaaacgaagtgtgcttttgtgggcaagtagattgaattggtattgtgggtagaatgattgaacgccccatcatgtgcaatacttctgaaatgttttgcgtgtggtatagttgcatcgccaaatcaatgatgttacctcctttgcccagtgcaaagtcataccacacgtttttggttaaatccaccttaaatgatgcggttttctccgtatgtagtggcgataagtaccaccacttatttccttttctgtttattggttcatatcccttgcttgcaaggaagttggatatttggattgcctttatttcttgtatagtcataatgtgagtgatttgttgaaatgttgagttgttgagagaatgggctggtgaaaagaaaaatagctttctcttttgcccagttacacctcttgttgagtgcttgttgaattgtatttgtttgagtaccaaagattagtctgttgttctcaacaattcaacaactcaacaaagaattataaacctaaagagtctataaattccttggtcaccgtgtagaaacgtcccactctgctaattgaggaaacacgccccggcttagtgtagtcacattgataggcaagataggtcagtgcattgtgagcaggggtaagtcgccagacatctttcacgacctttcgtatctgccattgctccacctttacaccgttcatggtcagtaacggtattaagtcttgagggatgaacgacagcttgtcaacgtgttgcgtttccataatgtcacgtatcagctctaccatatccaactccgtatggttgcggttgcactggataatgcggtcaagagcctctgtcctgataagggtaggatgaaaccacatacgcccctctttgttggtggagagtgtgcggtgctggagataatagaggaatgcaggtatctgttcctttagcttttgcaggaaattggtatcatcgctttcaagtggtcggattttacgcacccaatagcggttttctcccgggtcaatgataacagggtaaagttcgttgttggaacatagtacgaacttggcaaagaagtttacctcctgtctgtctttacccttggcctctaccttgtaggtttgggctgtgcttaggttcttcaatcgctctgaatcttctctacgactcaacagcacctcgtccacaacgatgagtagcttgccagcccagtcagcattgaactggctcctgaaatcctcgtttgtattaaaggtggcattgtcctgaaagatacttttcagaaagttcaggaaagtggtctttcctgtgtttcgttcctctgacaccaataacaggatggggagtttctgagtcggctgcatataaagcaactgcatatagtccaaccccagttcgtattgctcctcaaagatgtggtgtagcaatttttcaatatctgagaaattcccttctgccggaacatggtcaattggttcatacagattatagaaacctgcaacatccttttgatagtctgtgtgacttggcactgtgcaaaaaccattatatttatcaatagtagggatattgtgcttaccataatcttgtcggatagtgccaaagctccattgcaatctgcgggtagtcatcgttccatctgccaaaggctgctgcactaccttatatagtagtgcctactcgaatgtattgttcttccataatgcttgcttttagattaaacatttggattaacgctattagcagtttgtactttagctttcagaagtgaggagatttccttcttcgagtaaagattacgtcctcccaatttgtgaactataattcttccctccttctgcatacgccacaaggtggtataggttatgtggagtcgttcacatacctgatcgcgagtaaaatactcgtcactctcttctggtgtcaaatcggcctgtggctttttcccaactaattcttccaccaattcagaaacaacctgtttcaggtcatccttctgtaacattataaaattgccttgcatatcatgttgttttaataattacgctgcgaaattacgatggaataaaatgaaagcacctcggtaaaaatcatgacgatttctgccgaggtgcttttaacggaacagcgtttctttttaacaaatcaagcctttatgatgcaatcaatatacatcaggggaaagtaaggtgcgcagtcttatgcttatcaactttgcctgttcttttcctgtttgaacagtcttttctgataaactcaaattatagtcgttgccacgttcactgacaatggcattataaagggcttctccccaatcaaagccagacttaaatccaagggatgggaatttttccaagatggctgtatggaaagtacgatagttataggtatcattaagcaagcttccattggtcagcgcagcaaaaatataagcaagaatagaatccgtatcattcgtttccatccattcggtgagtattttttctatctcgttggtaagaaattctgcatgaggttgtataagcatttcttcaagcaggacacagacttgcttacgtccacgtctgcctttactctcttgtaatgcagaattagctacatctttgactacacgattgtttgctgctttccatgttcctttagtgtaagtcgctttatccatactggtaagcatcaaagagcgcataatttgttcgccaaagtttttctgccaaaaagaagtcttctctcccatcattgttttagttactaaatcagcggacttcacgaaaccattatcaaatatcatccaatagaacacactgaacaagaaaggattattgtgctgcaatttatcttttgtttcctctttgttaaatgtagaggcaaacaattcagtcagtttttcgtgtgcctgctgactaacattagaaaattgagctttgttgtagctctcagttcctgggcataggcttaacaataattcggagataccttttataccatcaagtgacagcagttctatcaagtaggaaaaacctttgaaggcgaagctcatgtcaccctcgtatgcttttgtgaagagatttgtgaactcttgatattctttcgggtgttcgtaatgccaacggcgcaaacgcaatagattcagttctcggtctgatgcctcttgagtttcctgctctttatcctgcaagtggaatttaaccacatctttgatatattgcgcatccgtagattgctcaaatttagtcatggcactctctatttccttaaacccattatccaattccaaatagcaatgcatacaacaagcagccatatcaccttcttctgcggctttagagaaggtgtttattatgttctcaacaggcatattctttgctgccattgcctctaaaagcatattttgaagcgagtaagtttcatcgcattctgccacattggttccatcttgtgatagaatgtccaatgtggaatgaatcttgcttttgaactctgcatagatttcttggttcgcctcaaaccattccttcatcttattgcccataagtgttattttagctaatagggttaatctttaagacaagccaacggaatgactttcacgccatcctgacgagtgtatgccatgcttccaccagtcatcactatcagcaaatctggttcccgaatgggcatctgtttctctgttgtgttatgttcctgtataagccttttgagttcaagcagatgcttggctccatcgtcaatctcacgactgccaagtttgcactctatcaaggcataccgtccatcttccagatgcagcactatatccgcttccaaatcatatcggtcatgataataagacacgtgactgtttaagtctatagtatatgcctttaagtcacgaatacacatctgttcaaagataaaaccaaacgtcttgagctgcatgctcaacgcttcaggagacaaccccaaaagagcaatcggaatggaagggtcgcagaaacatcgtttcacgccacttctaatagcggttttacttctaattgcaggacaccatgcacttatgttctggataacaaatagcttttccaaagctgcaacataatcatcaaatgtgtccacgtggcaacttacttcgccagatgaggtcacatcatccaaaagcgacttcttcttgaccagagtagaaacatttctggcatacgcccgaagtatcatactggtcagtctggcatctcttttcttgccatcaatgctggaaatgtcgttagagcaaattgtttgaacatagttctttgctacgagtagttgagcctttggggtacgagccaacaaagaagctggccatccgcctcgggaggctgcaaagattaattcctcaacggtcatcttagacatcttgccgtcaatatcataatctggattgttgaaaagttctttcaacgaaacttcacctgtagattcttgtgattcccacaaactcataggcagcatacgcagtctggcaatacgaccaactccagaatggtgtatttgggatttgtcaacggcattggaacctgtaagtataaattgtccggggatttgacgatcatcaacaacagttcgtactgcatcccacaacattggagcatcttgccactcatcaataaggcgaggcgtagctccatttaacagaatggacggcttagttttagcggtgaccaaatactcctcacgcaaactaggatcttgcattctcaaaatgctgtttgcaagttgagacgcagttgtagttttgccacaccattttggtccttctatcaatacagccccaaatgcatccagcaagtcttgcaacagggcatcggcagttcttttataataactcatataatatgctttttcaattgcaaagatacacattttctgcgaaatgcatggccaattcgtgttttttgtggcatttcaatccacttttttgcggtgttttattcggtatttttgtggcatttcaatccacttttttgcggtatttcacttggcattcttgcggtgagcaactataattagtctgataagttagccatcaactccgtccgttcctcctcgctcaagcctttcagcatctcaagcagggctttcttatctaccacaggagtactttctttcgacttctcattgagtagataatggttatactccagcatctttgcaagcggataagcaccgatataattggaagtaatgtcaccgccgccactatgccccatgctgtcgcttatatatttataaggtacgacaccagagttattgaggttggtagcgaagctgtgccttgcccaagtgggtgatggcacctgttccatatccaatagtttggcaacttttgccatgtgctcacgtatatatctgttgtagcgttggataacccatatctcttgttctggtgtgattaactcactcatgatggggaatacccttcgcccaagttttgggacattgccataccggttgagtatctcttgaatctctggagtaacaggaaatatcacttcgctggcactctcgttccgttcacgggttttgtggcgaagaaaacgaagctgtttgccatgagtggcatagtatagttcatcataagtcagtcggagtgtatctgcaaggttctgcccattgcccagatacataaaaaggaatagtccaaggtcgcgaaatatggcatacttctctctgccgaggaacagttcgtttccatctttgtcttttgcctcgtcagctttccaaaagtcatagagcttccgcatggtagccacgtcaagaaactcatgtttacggctctgcgctttgttgtagcccgtgtccttaaacatttctttggtatcacctttcatcagtccgttagcgatacacatattgataatggttcttagactacggagtgcgatagcaatagtggtggtgctcaattcattcttcttcatgttttttacccacttcaagataaagtcacggttaatatctgcaaacgatacatccgttcccaaatctttcacaaagcgattgcgtacatccttactacaacgagcggaacccaccttaccttcattggtcttagattgaatgtacgaatcccaaacagtgatgatggtgctatcatcgtctttcttgccttggaacctatcttgcaacttgcgaagagagaaattgttttctgaaatcagttgattagccatctgctccactctgtccatcagattcttcatatcgttacgctccgctaattggatgcgccgaccgcttttctcataatcgcaaagaaccaaccattcttccatagtgtatgattttcctaagcgcaggaaaatcttttgtccaccatgacacacacgcacagctactggaagcggttgcgaatagtcgcccgcttttcgtatgtcaagagtcagcgaaccatacacattgccattcgcagccgtaaatttcgcaaggcatttttctcctcttgcattggattttccgttcttctttgccatttcggtgaccttattcgttttttcaatctccataatgcacttatttatagttaatattctgctcgttttggtgaccttcaggtgaccttttcgcacgaaaaccactgcaaatatacgcatttccctgcaaacaacaaaacgtgttagatgctgattatcagtacaattacactttatgcaatcctatgaaataatccacaaaaagactcttgatctgattgtcgtcgttgcggtattggccgccgtaattggtggcgtcccagttgccctgcatctgttgcgtcagcgggctcatgtatcggttgcaaatcgagccgatgtccatactgccccattgcctgagttcgatgccggtgagctggaagttcggattcaggttggcggatttggtaggatcgttgttcagatccttgtccacgcacgaacccagtagcaggagcgataagatgagcagtatattgattggtttcatgttgattagaatttgaggttaatgttgaatccgaaactgcggcgcgagggcagcgagccgtactcgattccttttccgttgccgttgttgtagttggagtcggggtcgatgttcggaacgttcttgaagatgatcagcgggtttcgggctacgaacgacagggtcagtccgtccagcgcctttccgatcatcctccgcgggaagctgtagctgagcgtcatttcgcggatcttgacgtaggagttgtccagcacgaagaactggggaatgttgttggagatgaagttccagtagctttccgggttgcagtagcgggtattgggcgcccagctgatcgtgccgtcgtcgtttttgacctgaactacgccatccaccaaatagcctcccgtaggattccatgctgccgtttcgagtccggcggcaaggcgtccttcttcggactgataccagccgtcccgtcctttgagcgtctttttggagcgtccggagctgtaggtgccccgcatggtcgaggtgtagaggtccgcgccgactttgatgtcgaagatggcgctgaggttccagttcttgaaccggacgttggtgtacatgccgccggtgaatttccagtgggcgtttcccagcgcggtgtagttgtcgctgaccgaggggatgccggtggtcggatcgacgatgatgtcgccgttttcgttgcgtttgtaatccttgcccatgatcgtgcccagctcttcgcccaccacggccatgacgcggacgcccgctgcgcctacccattcggcgttctccacctcgtacatctgcgattcgcccagcgagtgcaccttgttggagttgcgcgcgaagttgaagcccagatcccactgccagttcttggtctttacgggaatggtgttgagcttgatctcgatgcctttgttggtgagcacgcccgaattgagcagggcggtcgaatagccggtgctgatggaggtgttgacgtggcggatctggtcgcggctggtctggctgtagtatgtaaagtcgagcacgatgcgcttgttcaggaagtagagctcggtgccgacctcccacgaacgggtccgggtcggtttgagatcgcggttgggtacggtcgagttggagatctgacccgacgatacgccgccgaccggatgcggataaagtgcgtagttgagcgacatctgataggggctggtgtcattgccgacctcggcccacgaagcgcgcaccttgccgaacgacaggattttggatacgctcgacggtaacagttcggagaagatgaagctgcccgataccgacggatacacgtacgtgttgttgatcagcgtggaggtgttgtcggccctgacggtgacgtccagataggcgaaattcttataccccagattgaccatggcgtaggccgagttgatttgtctctggtagggcgattcgacgatcgtcttgtcggagaaactgttgattttcttgatttcgggttcggccatgtccttgcccgtgatcgtggtctggaagttgtccacacggtagaggttcaatccggccgttccgaccagactcatgtttttgcccaagttggtgctgtaggtgagcaccgcgtccgcgttgatcgtgcggttgctgttggtctgggtcttcagatagcccgattcgtggctcggcgtggagatcggcgcgaagtcctcgaaactgaactcggtgatgtcggcgcctccggagagcttgaatttcagcttgtcggtgatcttgtatgagatgctggccgaggagatcagacggttctttttggaggtgttgctcatctcgttgatgatccagtagggattgacccggttcacgtcgccgttccagttgtagtattttccctcctcgtccttatagttgtcccgcagcaggtagaggtcgtaagtcgaaggcagcgaggagaggttcttgccctcgttgttgcggtcccctgccagagcgggacggttgttcactttctcgtagacgtagtttacttttacgtccacgtcgatcttccgcccgattttggtgttggtgcggaccgtgaacgtgctgcggttcatgcctgagttcggcacgatatcccggttacgcagatcggaataggagagtctgatgccggcatccttgtaaatcttgttgagcgtgatgctgttgttggccgtgacgccgagccggaagaaatcctcgatgccgtggttggagatggtgtagggacgcagtacgttgtcgaaataccatattttcagattcttgtcgatttttgggccccagcttttcgaggagttcgagcggtcgtcgatcgttccgtagatgcggccgttggatccctgtccatatatatattgtacgtcgtcgaagcgtgtcagctgctgctctacggtcgtggtggagttgatctccacgccgagggactgtcctttgcgggacgaggccttcttcgtggtgatcatgatgacgccgttgccggcctgcgagccgtacagggccgatgcggcggggcctttcagtacggagatgttctcgatgtcgtcggggttgatgctcgaaatgccgtctcccaagtcatatccgccgtccttgttcgcactgccgaaattggtgttgtcgatgggcattccgtccactacgtacagcggctggttgtttcccgtgagcatcgagctgcctcggatctccacatgggaggagccgctggggcctccggcggtctggctgatgatcaggcccggttcgcgtcccgccagcgagttgatgacgttcagctcccgcaccttttcgaacgcttcgcctttgatgtctcctaccgagtatcccagcgatttgcgttcacgggtcatgcccagcgcggtgaccacgacgtcttggatcgtctcgctggtcgtttcgagcttgatggtgaggttggtctgggttcccaccttaacctcggctgttttgtagccgaggaactttacttcgaggatcgatgccggggttacctgaatcgtgaattttcccgcagtggttgtcgttccggttgtcgttccctgaacgatgacggtggcgccgctcaccggattgtcgttttcgtcggtaaccataccggacacagttctcttttgggtgttaccccccccctgcccataggcgggactcccgaaaatcattgcgcaaaataacggaagcgcagtgtaaatcaataatagtcgaattttgttcatcgggttaataatttaagttggtttttataaaatgggtttttcgctcggatttttttgccgttagctaaataagcctttttttggtttaaatagtgactgaatattgtatttgtatgaaacaaaattgcgatttacttaattttgtaagatatttataggtttgtataattatgtggcatatggagagacgaaattcggcttatctttaaaatattaaaaataaagaaatagagagacgactttatcggtggaaaagatgggcggacggattcatatttggatggcttgtgtcgtgacggcgttctttgcggtcgcaagggcgaatgccggagcatatacgtttaaaagttatcaggtcgaaaacggcctttcgcaaaacagcgtgctttccatcctgcaggaccgggagggattcatgtggttcggtaccaaggacggactcaattgtttcgacggttattcgttcaaggtttatcgccgtcagagcggcgtggagacctcgctgggcaataatttcgtgttttcgctccgtgaggattcccacggccggttctgggtgggaacgggccggggcgtctggctgttcgacaaggagcgtgagacgttccgcaagtttcgcgtcgaggtttcgggccgggatatcctgaccgcgcagatcagtgcgatcatggaggacgatgctggcgacatatggctggcgacccacgggcaggggctgttccggatcgacaggaatctggcgtgtacgcaccatttccagactccgcagattccgtccaatttcatcgggtccgtcgttcaggacaagatgggcggcatttgggtgggaaccgtcggcaagggaatcgtgatgctcgatcccgcgacttcgcgggtcgattcgctgcccgaatatgtttcggagggaatccgggacaaagtgatttcgagcctttattgcgacgacaacaacaatgtctgggtcggcacgtcgaaagaggggctgcattgtatcaacaaccgtgcgctgcgggtgcagcactacctcgacaaatcgattctgaacatccggtcgattacgcagtatctcgatgacgtaatcgttatggggtcggacaacgggctggtcatgctcgacacctccaccggcgaatatcgcctgaccaacaagtcgctcaacagcaatctgtccgacaattcgatcttctcgattatccgtgaccgggagaattcgctttggataggcacctatttcggcggcgtgaactattattccccgttgatcaatcgtttcgagcattattattccagtaacgggcatcgcaatttcaacgggaacatcgtcagtcagatccggcaggacaagaacgggaagatctggataggaaccgacgacaagggactgagcctgttcgatccgcagaccggacaattcgagccgagtgcgttgtgcggaaaggtcacctaccacaacgtgcaggcgattctttgcaatgacgactacctgtgggtgggcctttacaacaagggaatcaaccggatcgacttgaaaacgggccgcgtgaaaaactatgtcagccgtcccggagacagcacgggcatcgacgacagcaacatattcgccatcacacggctctccacgggagagctgctcttcgccacgccgatcggggtgaacgtctataacgccgcagaggataattttacgcggattccgcaactggtcaatgtctttgtgaaatccattttggaggattatctgggcaatctctggttcgccaccaacaacgagggaatctggtgccggaccaagagcggtcaatggtgccgctacgtcaacaatcccgcggactccaattcgttgagttataatgcggtgaattatatctacgaggaccggaagaaccggctctggttctgtacggacggcggcggggtgtgcctgtggaatcaccgggacaagacgttccggacgatcgacgaaaaccgggggctgcccaacaatgtggtctacgcgatcgtcgacgatttgaacgggcatctctgggtcagcaccaacaagggactcgcggcgatcagcgaggaggactggaccgtcaggacctacaactcttcgcagcggatacagaacgtactctataattacaatgccgtgctccgggaccgggacaattatctctatttcggcggcgtgaacggcttcgtccgtttcgatccgcgggaaatcacgcccaacgattttactccggcggtcaagatcacggcggtgagcgtgctgaaccgggatattcccgtatcggagggcggggacaaacggtttgtgctcaaacgcaatcagtccaccttccggttcgacttcgtgctgttgagctacgtttcgccgccggataatctctatgcctataaactggagggctttgaccgggactggactacggtgcagggttatccgcacgcccattacatgaatatcccttcgggaaaatacaggttccgggtccgggccgccaatagcgacggggtatggaacgaccgaagcgacgaaatagaaatcgttgtcaaacgtccgttcttttcttccgtggcgatgctcgtgctctatacggcgttgctgctggccggaatctggttctgggtccgaaggttcaggtcccgcgtcaaggcccggagcgagaagaagtttctggaagacaagatcaacttcttcaccaacatcgcccatgagatacgcactccgctgtcgctgattacggcgccgctcgaaaatatcatcaaatccggtgacggcaccgtgcagacgagagacaatctgcacgtgatcgaacgcaattccaaccgcctgctcgaacttgtcaatcaactgctcgattttagaaagatcgaggaggagatgtttatcctcaaccgggagaggacggatatcaacggtattgtccgcaaggtgtacgcgcagtatgagtacgaggcgcgggccaagaacatagacctgcggatcgagcttcccggagaggaggtcgggtgtcttgtcgatgcggaggcgattttcaaggtgatcagcaacctgatgtcgaacgccatgaagtttacccgcgacacgatctggctggagttgtgccgggacgagggtacggcggtggtccgggtgcgcgacaacggggccggactcgatgaccgggatgccggcaggatattcgatcccttcgtgcagggcagcaacaatacgctgagtgccggttccggaatcggactcgcgcttgcgcaggcgctggcaaggaaaaacaagggcgaaatcgaacttgaccgcagctgcggtcaaggcgccgtgttcgtactgacgcttccgctggccgaagccgctgcggacgaatctttggccaagcatgcgactcattcgttcggaggcgccgccgaggacaatcgccagcggattctggtcgtcgaggacaacgatgagctgcgggaattcatatgccgcagcctgagcgatcagtatacgattgccagcgccgttgacggaatgcaggcgctcaaggttttggataacgaaggggtggtggacctcgttatctcggatgtcatgatgccccggatcgatggattggaattgtgcaaaaggatcaagaacgatccggcctattcgcacattccggtcattctcctctccgcaaaggtagaccagtcggttaagatcaaggggttcgaacagggcgccgacgtgtacatcgagaagccgttctcgatggaccagctcaaggctcagataggcagtgcgatcgagaaccggatgaggttgagggacaattttgtccgttcgccgctgcaatacctccgggagaaccacggcggctgcgacatccagttcctcaacaaactgaacgatacgattctctccaacctgaccaataccgaattctcgataaacgggctggctgaacttttttgcatgagccggtccagcctgcataagaagatcaaggcgctgacggggctgactcccaacgactacatcaagctgatccggttgaacaaggcggcggagctgctttcttcggggagctacaaggtgaacgaggtgtgctatctggtcgggttcaacactccgtcgtattttgcgaagtgtttttataaacagttcaacaagctgcccagttcgcagctcgactgattgtgcgggcagtttgaccgccgttctttgtattgtgcaataacgttgtatatgtggcgcagatattggtaggcgcggatcgccgtgccggttatatttgcacggccgtctgtatgatggcgagtgtactaacctaaatgatctgtagatttatgaaaagaattgcattagcggcgtttttgtttgtgacgcttgttctttctgccgcagagccggctcctacgctcaggcgcaatacggtggacgaggtgatcgccgccatgacgcctgaggagaaggtgctcatggtgatcggcaacaaaaacaacgaccggcgcaggtatatcggcgaaggttccacttggtattgcgcaaggctcggtctgatgccgaccgtcatgtgcgacggtcctgccggagtgcgcatgaaacccttccgggacggcgactctaccaaagcctattacagcaccgctttccccacagccaccgcgctggccgctacgtggaataccgaattggtggagacggtcggtgacgcgatgggtaacgaaacgcttgaatacggtgccgacgtgcttctggcccctgcgatgaatattcagcgcgatccgctgtgcggacggaatttcgagtactattccgaagatccgcttctgtcggggaaaatgggcgccgcgatggtgcgcgggattcagtcgcagggcgtcgggacttcggtcaagcatttcgcggcgaacaatcaggagagcaaccgcaagggtgtcaatgccgtgatcagtcagcgggcgcttcgggagatttacctgcgcggcttcgagatcgcgatcagggaggctgcgccgtggaccgtcatgtcgtcctataatcggcttaacggggtgtacgcctcccagaaccgcgacctgctgaccacggtgctgcgggacgaatggggcttcgacggaatggtgatgaccgactggttcgccggcgacgacggggtggctcagatgaaggcgggcaacgatatcatcatgggcggcttccctcacggtcattacaaataccatcagcccgaaattctcagcgcgctttccgacaagacgctcgatgaggaggttcttgaccggaatatccgccggatactcggcttcgtcaagaaaacgccctcttatagggaatacgcctgctccctgaagcccgatcttgcgcggcatgcacaggtcgctcagcgtgctgcggacgaggcgatggtgctgctgaaaaacgaccggaatacgctcccggtcagaaaaccgaatcgggttgcgcttttcggcaagacgtcctatgatttcatagccggaggcacgggcagcggcgaggtgcattacggtcatgcggtatccctcaaagaggggctgtcgaacgtcgggttccggatttcgtccgccgcggaccgtttctacacccggttcgtcgattcggtgtttgctgccggcgggcacaagaaatatgcggtaacccgctctcaggaacctcggatcgacaaggctctcgtcgaagcggaggcgaaggttacggacttgggagtcgtgactctcggccggttgtccggagagggcgtggaccgtaaggaagagggttatttcaccctgaccgacaatgaaaaggaactgctcggagccgtgtgttcggcctatcatgcactcggaaaaaaagtggttgtcgtactcaatatcggaggggtgatcgaaacggcttcgtggaaagagctgcccgacgcgatcctgctctcgtggcagacgggtcagcagggcggcgctgccgttgccgagctgcttcggggaaccgtcaatccttccggaaagctgcccgtgagctatcccgtttcatatgccgacgttccgtcgtcgaaatcgtttccgggaattcccgccgacctgccggtcaactcctactataacgagggtgtgtatatcggctaccgctattacacgacgtatgatgtccctgtgtcctatccgttcggttacgggctttcttacactcggttcgaatattccgacctgacgctgagcagcgattcgtttccgggacggatcgatgtctcggtaaagatctccaacacgggcaaagtcgccggaaaagaggtcgttcagctttatctgacggcaccggcggtcttgcaggacaagccggagcgggaattgaaaggttttgccaaaacccggcttcttgcgcccggtgagagtcaggtgcttacctttacgctcgatccccgttcgctttgctccttccgcagcggcatcagcagctgggtggccgaggccgggcgttacgaggtgaagatcggcgcttcgtcgcaggatatccgtcagcgagcctcctttacgctcggaaaggagctggtcgtcgagaaactgcacgatgtcctcgcccccaatgtgccgattaaggatatggggacgacctcggcaaaagtccttggaacggatcagcctttcgaccactaccatgaactggattataaattcaactggcactggtaactttccgttcccgttcgttcggggacggctctgcgcccgaattgttccgccccgtctccgcactttcttcctgaaaagcaaaaccgcgttagaatcgtttctaacgcggtttttagtgcccaggacaagactcgaacttgcacgaactaaacgttcactaccccctcaaagtagcgtgtctaccaatttcaccacctgggccttacctccgaatttcggatttcgggtgtgcaaatatagggtataaattttaatccgccaaattttcaggacggttaatggcaatttttgtgcttcttcggttctcttattcggaaacggggccgtttctccgccctgcggcggcaaggcgggccggccggccgacctgcggtacgacgtgcatcgaatcctccggcggcgccccggaactactccccgtgctgcggggagaggacgagcatgcctgcgggtcttcgcgcgtcttccggcagcgagacacccgctatcggcgcgatgcctgcggcgctccggcccggagcgggcgtgtaggtgcggcccgtaatcaggctcagggccttggcgagcatcggctcctcaggtccgaaatccaccagtctgttgttccagtcggcgaccgcataatcgaccgcgagtccggccggattcaccgtctcctttttggcgttgtagccttcgaacgtgatcggggccagttcgtacgaatagtcgccgtcgtcgaacttgtcgatctccatgcccacgttcttgccgttggtcttctcgccgatcagcgtcacgctgatgtcgattcccctcaacccgttgatgaccgcttcgctcgacgacgccgtgctgcctgtcgtcagcacatagatgttctgcaggccgagggcgtactgcttgaggtccgccccgtagtagtcgccgtagctgaaattctcgtaaaagagcgctttctcccgatcgtacgtattgcccgtctgcttctgggttttcgccggatcggccatgcggctgtcgttgtagcggtaatactggaaaaccttgccgtcgcatttttcgcctgcgatgcacgtcgccagcatctttgccgaaatcacgtgtccgccgccgttgtagcgcaggtcgagtaccagatcggtgattcccgcgtcgcggaacttccggagggaatccagcaggtcgtcgtcatatgccgcgtcgaacccgttgtagaccatgtagccgatcttgtgctcaccctcctcgatgacctccgcgcggagcaccgggttcgggtagagccgttccgccgtgagggtggtctcttcacccgtctcccggactttgaagaggaccgacgcggctcccgaagggcttgtcagccgcttgtatacgggggtgtattcgctctccgaatcggcgatctcggcgccgtctatctccgagaagatcgtgccccgtctgaatcccgccctgtctgccggggagccgggatataccgccatcacgtaaaacccggccttccccgtgttggagaaccggaccacccccagccgggcgaatccgaacccgtattccgtctccttgcggacgccgtgattgacgccgcgcgttttcggccccgtggccgcgcggctccgggctttgcgggtgatgtaggagtagagtttgtaataattctgtcccgtgccgttcgtatacctctttttgtcgagggtgttggaggtcatccccagcagggtcctcgtcaggaagttgtcattgtcggcggcgtattcgatcgtcaggtcgcgggtcatctgcccatactcgctgttccatagatagcgttcagccagatagctgtctatcttgtcgttgtacgactccgtggttcccgtgccgccgttcccggccgtatctttggcgcaggaacccgccgccagcgccgaaaggagcgccgcggcccatgcgcagtgaattattctcatctgtcgaattttttatccgctaaaggtagcgatatttttctatttcctcttgccgaagtccatttcgccgaacaaatagcccgccccgccgatgcggtcgatcacgaacagcacgtaacggatatccacggctatgttgcggcagatcgtctcgtcgaaggccacgtcgctcatcgtcgaacgccatgtgcggtcgaagttcacgccgaccagctcgccccgtgcgttgaggatcggcgatccggagttgccgcccgtggtgtggttcgtggcgaggaagcagacgggcaccgtcgtgcggccgtcgatttgcgtggcccagcgtccgtactccttcgaggcgtggatgtcgcgcagcgcctgcggaatgtcgtagtcgtagatttcggggttgtccttggcgatgatgccgtcgatcgtggtccggggcttgtgatactcgccgtcggcgtattcgtaccccgccacgtgtccgtaagccacgcgcagggtcaggttggcgtcggggaagaacgcccgcccggcatcccactcgcgcagtcccttgatgtaggcggtgtagagttcgttgagccgtgcgctgttgaggttgcgcagcgagcgggtgcccagcagccattcgatatggtcctgcatccgcttggcgcctctggccagcgtattgaccgccgtggtgtcggagccttcccatacgccgctgaaaatccgttcggcgaaggcttcgggcgatcctgcggctgctgcgcccgcgaggaactccggcgcctgatactggactggacagcggcgcgcgtactcgccgaagaggtatctgtaaagggcgcgctcggtcgcttcgcgctgtgcgaagaccgcttcggcccgctccgcggcggtgtagcgcttgggcagggcgtcgagcgtctcgcgggtgatctcgcgtgcgaagtaggcgtccgcgatgcgggcgtattcggccttcaggtcggccacgacgctgcggtattcgggtttgtcctgcgcccacgccgcgaagtcctcttcgtaggcgcgcttcgaagccaccgtgcccagccggttgatgcccagcacttcgccctgccatttcttccatgcgttggcgatcgaggcgtgcttggcggcgtagtggatgcgcagcgccggatcgctctgctgcgccgccgagatgatgtcgagacggcccgtgcggacggcgattttcgccgggtccgaacgctcggcgatgtaggccacggcgtccgagagaatgtactcctgcgtgttgccggggaagccgtaaatcatcgtgaagtcgccctctccgacccccgcggtcgagattttgaaatgccgcttgggtttgtagggcacgttgtcgggcgaataggccgcgggtttgttgtccctgccggcatagatgcggaacagcgagaagtcgcccgtgtggcggggccagatccagttgtcggtgtcgccgccgaacttgccgatcgacgagggcggggcggccaccagacgcacgtcgtcgaactgctcgtagacgaacaggaactgctggttgccgtaatacatctgctccacggcggccttgtagcccttgccttcggcctcggctctgcggacgatctcctcctgcgtctggcctgcggccagccggtcggtcacctcctccatgcggacgaggaatttcacgttgagcttctcgttgggcagctcttgggcgcgcgacatggcccagaatccgtgggtcaggtagtcgtgctcgacgctcgaatgcgactgtatggcgtcgtaaccgcagtggtggttggtcagcagcagtccttcggccgagatcagctcgcccgtgcagccgccgtcgaacagcaccacggcgtctttcatcgaagccttgttgatcgaatagatgtcttcggccgtgagccggaaaccttttgcgcgcatgtcgtcgatgcgctgcgaaatcaggctcgggagccacatgccctcgtcggccgaggccgcgagtgcgaaaagcgaacagatgagggtaagcagtgtgcgtttcattattgcagaaatttttccaattcgacgtaaactttctggatcggcagtcccatgacgttgtagaacgaaccgttgatcttctcgatggcggcgtagccgatccactcctgaatgccgtaggaccccgccttgtcgtagggtgcgaaggtgtcgaggtagtagccgatctcctcctccgagaggggccggaaccagacgccgctttcggccgagaaggtgtgcatgcggccggcggtgcgcagcgtcacgcccgaaacgaccgtgtgtcggcgtcccgaaaggcggcggagcatctgcgcggcctgcccgcggtcgcagggcttgcccagcacctcgccgtcggagatcaccaccgtgtcggccgtcagcaggatgtcgccggggccgagcggcgcggggtatgcctcgcttttgagccgcgagaggaacagcggaacctctccggcgggcagggagtcggggtaaatctcctcgcactcgtatttcggggccggttcgtagggcaggccgcagcccgtcatcagctccctccgccgcggcgactgcgatgccagcagcaggcggtaaggtgcgagtttgtctttcagcagcatggtcttgtttttagggtctttattatttaatgttatatgcggtttttgccgtatcgcctcccggccgccgcctttggcggcgtttgcaaatccggtccgccccggaagggcctcctgccgccgtgcggcgaaaccggcgatgcggagcgtcggagcgaagggcgcataatcgtctttttatcggtgcggagtctgtctccgcgccgtcagcgtatgtcgaaattcagcagttcgcgcccttcgagcacggcccgcaggttgtcgccggggctgaccggtcccactccggccggcgtgccggtgtagatcaaatcgcccatgcgcagggtcatgtaccgcgatacggcggcgatgatgcggtccaccgtaaagagcatctgccgcgtgtcgcccgtctggcgggtctggccgttcacctccagcgtgaagtgcagcttctgcacgtcgccgtccagctcctgcaaagatacgaattccggcgaaatcgccgctgagcggtcgaacgccttgctgcgctcccacggcagaccttcggcggcggcctgccgctgcaggtcgcgggccgtgaagtcgatgcccagccccacctccttgtaataacggtgtgcgaaacgctcggcgatgctctttcccacgcggtcgatgcgcaccaccagctcgcactcgtaatgcacctcctgcgaaaaggcgggaatgtagaacgggtcgttgttgcgcagcagcgccgtgtcgggtttcaggaaccagatcggctccggggaacactccccgcagcccggccggttccgttccggcagagtctccgctccgcccccggcttgccgagaccgttcggccgggtcttccgccccgccccttatcaggtggttcagctcctcggcgtgcgcggcgtaattgcgtcctatgcagatgattttcatggttttccgttactgtttgttgtgatcgtaccgctgcgcccggaccagcatccagacgacgtagaccggaaggtaaattacatagacgaccggcagggcatcctgctggcctgtcaggttcaggactactgcaagtaaaacccataacgccccgataatcaccagatgccgccgcatgaacgacgacagccctgcgatatcgacgtttttcttcttctccgcaggcatggtgttgtagcccgcaatcagcatcggaaaccgcttgaccagcagtccgacgacgatcaggaatacgccggtgaggatgtgtatgaaaatttcgtccataacttcaggttattgtgcttcggtcgcatgcagctctgcgaccatccgggcggcgaatcggtcgctggcgccgggacctccgataactttgcgtaattcgtcgaagtcggagagcatcttttcgcgcttggagccgccttcgacgacggcccgcagttcgcgctcggcgcgcgtgatgtcgagccccgactggatgatctccgcaaccgcctcgcggccgaggttgaggttcacgagcgacacccaaggcacgttcaatacgtaaggctgtagtttaacctgaaaccataacgttctgtaaaccaccacttcgggaatgccgagcagcgccgtttcgagcgtcgccgtaccggaggtcaccacggcggcttcggccgcggcgagcgtttcgtaggtctggtcgcagacgtagcggatgtcgctgccggccatgtactgttcgtaaagcgccctgtccagccacgacacgcccgcgacgacgaactggtggccggggaacttcttcgaaaggtcggccatcagcggcaggttgtcgcggatctcgccccggcggctgccggccaagagggcgacgatcggccgcccgtccaatccgttgcggcggcggaattcgtcgggcgaggggagcgcggcgcgtttcgcctcgatggcgtccacgagcgggttgccctcgaaaatcggttcgatgccgtgccgggggaagtagctgcgttcgaaggggaagatgatgaagagccggtccacgtatttgcggatcgccttcaccctccattcgcgccacgcccagaccttgggggcgatgtagtagaaggtgcggatgccgtgctccttggcccagcgggccatcttcatgttgaagccggggtagtccaccagaatcagcacgtcgggggcgaacgccgccacgtcggcctgacattcgagcatctgccgtttgatcgtccgcaggtttttgagtacctgcacgatgccgaaaaacgaggtttcgcggtagtgcttcgccagattcgccgcgccgcccacggcggccatgcggtcgccgccccagaagcggaactgcgcttcgggatcggccttgcgaagcccttcgatcaggtttgcgccgtgcaggtcgcccgaaggctcgccggcgatgaggtagtatttcatgcctttgcggtttgttgcggttactcttcgttcagcaggtcggggcggagctgccgggtgcgctggtaggactgttcctcctgccagcgggcgatctgggcgaagttgcccgaaagcaggacgtcggggacccgccagccgcggaattcggcggggcgggtgtagaccggaggcgccagcaggttgtcctgaaagctgtccgtgagggccgaggcttcgtcgccgatggcgcccggaatgatgcgcacgaccgaatcggcgatgatgcaggccgccagctcgccgcccgtcagcacgtagtcgccgatcgagatttcgcgcgtgacgaggtgttcgcggatgcggtggtcgatgcccttgtagtggccgcagaggatgatgatgttgtcgagcgtcgaaagccggttggcttcgtgctggtcgtagcggacgccgtcgggcgaggtgtagatgatctcgtcgtaatgccgctcggactggagtttctcgatcagttcgaagaccggttcgcacttgaggaccatgcccgcttcgccgccgaaggggtagtcgtcggtggtcttgcggcggtcgtgggcgtagtcgtggaggttatggacgacgatctggaccagacccttctcctgcgcgcggtgcaggatggattcgttgagcggggaggtcagcagttcggggacgactgtcaggatgtcgatgcgcatgtttctgaattgaaaaattgaaattactgcggacggaagatgatgtccttggcgcttgcggcggtcagggggatttcccgtccgtgttcgagggtgaaagccttgtagcccagcgccgtgaagagttcgacgatgcgggggcggttgccgccgcccgtctcgacgagcaccgtggggcggaagcgttcgagcagcgggcgcagctcggtcagcaccacgacttcgtagccttcgatgtcgcatttgacgaagtcgaggcgttcgagtccggcgaagagttcgctgccccggcgcatctgggccgagaactgcgcggcggcgaccgcgccgctgtcgttgacgaagttctgtcccgtgccgaagtagcccgtttcgcgcgccgagtcgttggccatcgtgatcggtttgttctcggtgcccagcgcgtaggggagtatctcgacgttgcggcagcggcggaggttgcggcgcaggacggcgaggatcgggggaaccggctccacggcgtagaccctgcccgccgggccggtcagccgggagagcgtgcgggcgtagtagccgaggttggcgccgatgtcgacggccgtgtcgcccgcgcggacgagctgcggcaggtggtagacgtattcggtggcgggggcgtaacgcccgatgccgagccgctgccagaaaaagaacaggcggctcacggcgcgcaggtagccttcgagcggcagggttcggtagaggattttatggatcagtgtcttcacgtttccggaggtttgcggagcggattttcccggacggcatccgctgcggtgtcgaggcggagcctcagttcttgtagttcacttcttggttgaggacctcgacgacgaaggggttgtagagcatttcgtggccgatggtcgattcggggccgtggccggggtagacgcggacctcttcgcccagcgggatcagggagtcgaggatcgagcgcatgatccacgaatagtcgccgcccggcaggtcggtgcggccgatcgactcgcggaagagcgtgtcgcccgtgaagagcgatttggattcggggtcgaacagcgccacatggccgggggtgtggccgggggtatggatcacgcgcatgacggtatggccgaagcggatttcgggcgtcgtgtcgaggtcgaggtccgccgcgggcatctcgccgacgggaacgccgaagatgctgccgctggtcgaggcgttgtccagcaggaactggtccttggacgagagcgcgaaggggatgccgtagcgtttcttgaggtgcgccacgcccagcgtatggtcgaaatggccgtgggtgttgaccgccagaacgggtttgagtccgtgctgggcgatgaagttgtcgagtgcggcgtcttcgcgcggattgctgttgccggcgtcgatgacgacggcttcggaggtgtcgtcccagacgacgtaggtgttttcctgtatcgggttgaattgcaggcaggctattttcataattcggtcgtttttcggaatcgtaatgtatttgtgcaaagactgtgcagaccggacgggccgggccgcatcgtctccgggcggatgtttatcatgggcaaatatagcgttttttaccggattttacctatctttatgacccgaataaacttactcgacatgaaacgactcgtcgctttgattttcgcgctggccgtgtgcggcgcgggagccgcggcccggccgggtgcctacaggaccgtgaaaaacatcgcctaccgcgacgccgggggcgaccggaacatcgacacgatgtgccggctggacctctattatccggcggataaggaaggcttctcgaccgtcatatggtatcacggcggcggcctgacgggcgggcggcgcgatatccccgaagcgttgaaggagaagggattcgccgtggtgggcgtggagtaccggctctcgccgcacgtgaaggtggccgactgcgtggacgatgcggccgcgtcggcggcgtgggtggtgaagcatatcgccgagtacggcggcgatccgcggcggattttcgtggcgggccactcggcgggcggttacctgacctcaatgatcgggctggacaagcgctggctcgaaccctacggcatcgaccccgacacgaccttcgcggcgctgattccctacagcgggcaggtggtgacccacttcgcgcgccgccgcgagatggggattcccgacacgcaggtggtggtggacgacatggcgccgctcaattacgtgcggcccgactgccgaccgatcctgatcctttcgggtgacagggagcgggagatgctgggccgctacgaggagaacgcctacttctggcgcatgatgcgcgtggcggggcatcccgacgtgcggatttacgagttcgacggcttcgaccacggcaacatgccgcaggccgggcactttgcggcggtgcgctatatccgcgagatggagcggaaaatggagcggtagttgtgtagaatcggagctatgaaaataaacggatatgcgcttttgcaggccgcggcagccttgtgcgccgcgcttgcgctgacggggtgttcgctgctgaaggtcgccgtggctacgggcgaccccctgtcgaaagaggagatgaacgtgcggacgatgacgcgcggattctattacgacatggccgcagaggtggcgcgcacggccgattcgatcgcccaagcggcgccggatgtggctacgcgggtcgccgccgtgcggtggaagatacgcgctacgcgggcgggcgtctcggccgccatgcagggaattcccgatgtggcgctggccgacatgtggatactctgccggcggatgaacgaacgctttgcggcgacgcccgattcgctgctgttcggggcgcagagcggcatggcgcgcgatgcggcggcgcggctcgaccgccgggccgcgcggctggcgcggcaggtgttggcggaggagcgttacgcgctgatggagcgttttgtcgcgcagtatgtgcgggacaatccctccgaagaggggatggaggctgcgaacaccacccttgcgtggatcgagttcctgcgcgagaacggcgtagagcacgcctatgcgacgggttcgatcgccgaagtgctggccgacgtgaacgaccgcgtgagcagccagacgcagcaactggccagcagcgtcggctggtcgaaggacattctcgaaatgcagctgcagcaggacagcctgcgcatggaggtcggggcgcgcctcgactcgctcgaacgcagtttcacgcgcatcgtcgtcgtggccgagcatctgcccgaaatatcggaccgggtgctggacgagctgaacaaacaggtgacgcagctgatatatacgatgaattacagcgtcgataacgcctttgccgatttcgaccgccagcgcgacgagctgcagcggtatgtgaccggagagcggcaggcgttggtcgagcagctgcggcagacggccggcgaggtggtgcggacgacgctcgacgcggtgccggggctggtgggcaaggtgttgctgtacgtggtgttggcgctcgcggtgctgatcgggggaccctttgcgctggggttctggctgggcggcgtgagggcgagggccggagcgaagagaaaggagtaggcggcggtcccgaccggactgcgggtgtctgaaacggaacgggtgcggcggccagatcgccgtgtcggcggaggtgaaggacgagggcggcgcttcggcaaaatgcaagcgaacttgcttttgccctcagtttgcactatctttacagaacataggcggcggctcggcaatgtccaaataaatttggcattgctctcgccttgcactatctttgccgcaaattggaagacgatggctcgcaaaaaggcaaattatcccctcatcgaggggcttgaaataacgacgctcgccgccgaaggcaaggcgatgggacgctggaacgacgtggtggtgttcgtgccgctgaccgttccgggcgacgtggtggatgtgcagatacgctccaagcgccgcaggttcatggagggattcgtggtccgctacgtcagaaaatcgccgctgcgcgcggaggccttctgcgcccatttcggggtttgcgggggctgcaagtggcagaacctgccctacgaggagcagctgcgcttcaagaccgagcaggtgcgcgaccagctgacgcgcatcggcaagatcgcactgccgcagatcgcgccctgtctgggttcggagcagacccggttttaccgcaacaaactcgaattcaccttcgccgaccgccgctggctgacgcgcgaagaggtggagagcgggacggacttcgatgccgcgcccgcgctcggattccatattcccaacatgttcgacaaggtgctggacatcgacaagtgctggctccagcccgatccgtcgaatgacatccgcaccgagaccagacgcttctgcatcgaaaacggctacacgttccacaacgcccgcgaacacagggggctgatgcgcaacatgatcgtccgcacggcttcgacgggcgaggtgatggtgatcgtggtgttcggcgaggacgaccgggagcggatcgccgcgctgctggaccatctggcggcgaatttcccgcagatcacgtcgctgttctacatcgtcaacaccaagttcaacgattcggtcggggacctcgatccggtttgctacaagggcaaggaccatatcgtcgaagagatggaggggctgcggttcaaggtggggccgaagtcgttttaccagaccaattcggcgcaggcgtacgagctttacaaggtggcgcgggagttcgcggacctcaaaccggaggacgtgctttacgacctctacaccgggacggggaccatcgccaatttctgcgccgcgcggtgccgccgggtggtgggcgtggagtatgtgcccgaagcgatcgccgatgcgaaggtcaattcgcagatcaacggcatcgggaatacggttttctatgcgggcgacatgaagcaggtgctgagcgacgggttcgtcgccgccaacggccgtcccgacgtgatcatcctcgatccgccgcgtgcgggcgtggacgagccggtgatcggggtgatcctgcgcgccgcgccccggcggatcgtctacgtgagctgcaatcccgccacgcaggcccgcgacttggcgctgctcgacgccgattaccgcgtcgaggcggtacagcccgtggacatgttcccccacacgcaccatgtggaaaacgtcgtgaaactcgtacggcgatgagactggacggtttcgggatattcgtcgagcggatgccggccatggtccgcttctaccgcgacgtgctgggattcgagatccgcgaggatgaaaacgcctcgaacgtctatctggaaaaggacggaacgctgttcctgctctaccgcagggcggatttcgagaagatgaccggccgcaggttcggctatgccggcccggtgaacgggcattacgagattgccctgagcgtcgaaaaccatgcggcggtcgatgcggccttccgcgaggtcgtcgccaaaggcgcccggcccgtcatggaacccacaaccgaaccgtggggccagcgcacctgctacgtggccgaccccgaaggcaacctgatcgaaatagggtcgttcaaggcatgattccggagaggggatgcagtatttcggatttttggcgttttatttgcaagacagttacctaaaaaacggaaaatatgaaaaaactgattttaatggcggcggtggcgctgatggctcttcccgcggcggcacagatgcaggaggctttccccagctatattcaggtgaacggacgcgccgagaaggagatcacgcccgacgagttctacctctcgatcgtcatcaacgagcgcgattcgaagggcaagatttcggtcgagagccagcagcgcgacatgatcgcggccctcaagcggctgggcgtgaacgtcgagaagcagctgaaggtggccaacctttcgagcgagttcttcaagaagaacacttcggtggcgacggccaagtaccagcttcagctgggatcctcggccgaggtggccaaggtgtggcaggcgctcgacggactcggcatctcgaacgtttcgatcctgaaggtgtcgcactcgaagatcgacgagtataaggagcaggtgcgcgtcgaagcgatgcagaacgccaagcagagcgcccagacgctggccggggcgatcgggcagaatgtcggcaagtgcttctatatttacgactcgaacaacaacgtgatgccggtgctgtatgacaacatggccgtgatgcgcagtgcgaagaccgggtatggcgaagaggccgcggcggacgaaccgctcgacttcaagaccatcaagctgcagtataacgtgcaggcgaaattcgtgctggagtagctctccggcggcatatgcgaagaggatgtcccgcgaagggcgtcctcttcgtcgtctcagggtgtcgcggacggaggttgtcgcgcttcgggtcccggattcgcgggcggagcgcggaggaaggccgggcgtggtcgcggacgaagcccgccggatgcgaaaaacggtgccggatggtgcggattccgaaaaattatactatctttgtttactttaccctttaaaaaaggaggagttatggaaaaacagttttgtttcaactacgagcattatgcggctcttgccgagctgtccgatgcggaccgtgagctggttcgggaggccgaacgggccacggccaacgccaatgcgccctattcgaagttccgggtgggagcggctgcgcggctgcgcagcgggaaaatcctctacggaagcaatttcgagagcgaggtctatcctgcgggactctgcgccgagcggacgctgatgttttatgcgcaggccaattatgccgacgatccgatcgagacgctggcgatcgcttccgatccctcggagcgcgaatgttatccctgcggccagtgccgtcaggtgatggtggacgtcgaacgccgtcagggcgcgcccatgcgggtcatcatgagcggcggcggcacggcgacggccgtcgattcggcggcgctgctgctgcccttcacgttcgtgctctgacccgcagcgagcatgtccgagataccggcttcggcggcgcggcccgccgacggcggagaaacgttgcgttgaagtacaggccgcttttagaaatacccgaaaaatgttcactcccgaagatatcctctacgaagacaatcatctgctgatcgtcaataaacgctgcggcgatctggtgcagcccgatccgtcgggcgaaagcgcgctcgaagaccagataaaggcctttgtcaaacgccgcgacgccaagcccggcgacgtgttcctcggcgtggtgcaccgcatcgaccgtccggtgagcggcgcggtgctgttcgccaagacctcgaaggccctgacgcggctcaacgagatgatccgcgagggccgcatccgcaaggtctactgggccttgaccgaacggacgcccgaccccgaaagcggcgaactgcgccactacatcctgcgcgacgcccgcaccaaccgctcgcgggcctgcgacgggccgaagcccggcgccaaggaggcgcgcctgcgttacgaaacgctgggggcggggaccaactatacgctcgtcgaggtggagctgctgacggggcgtcaccaccagatccgcgcccagctctcgaagatcgggtgtccgatccgcggcgacctgaaatacggcgcgcggcgttcgctgcccggcggcggcatctcgctccattcgcggcgggtcgagttcgaacaccccgtgcgccgtgaacccgtgagcgtcacggctcccgcgcctgcggacgacaacctgtgggcttatttcgaaacccgttgatttcccggaaaatatgcgattgttgattcagcgcgtgaagaacgcttccgtcagcgtcggcggcgatgagctgtcccggatcgggcagggcctgctggtgctggtcggcgtgggcgtggaggacacggacgaagatatggagtatctggcgggcaagctggtccgtctgcggattttcgacgacgggcagggggtgatgaacctcgacgtgcggcaggtcggcggcgaggtgctggtggtgagccagttcacgctgcaggcttcgacccgcaagggcaaccgcccgtcgtatgtcagggcggcgcccgaagccgtctcgcgcccgatgtacgagcgtttcacggcccgcgtggccgagctgctgggccgggaggtgccgacgggggagttcggcgccgacatgcaggtggcgctggtgaacgacggtccggtgaccatctggatagattccaaaatgagggattgttaaccgaaaaatagaagatgaaaagattattgacagttttgctggcaggtatttccgcaggtttcgcctcctgcggagacgacggcgcggagaagggggacacatggttcctgaaacccgaagcggtggtttcgggaacgacggcggagatctcctgccgcacgaaattcgccgacggcgtgctgaccgagagcggcgcggggttcgtatacacgcggatcggagccgcggacggctatttcgacgccgagccggtggaggtgagcgggaatgcgctttcgtgccatttgagcgacctcgaacccgaaaccgactacttggtgtacgcttatctggagctgggcggcgcagggcgcatgcagagcgaatcggtctccttccggaccgggaagggaagcgatccggggaatgcgccggcattcggacagcccgcctactcggaggtgacctcctcttcggcggtggtgagctgtacgttctcctatcagggtgcggagcctgtttccgaggtctatttcctctacgggacgggcggcgtttcgaaacgcgaagccgtgagtgcgcagcccggcgcgaagagcgtccggctttcggggctggacgcttcgacggactatacgttccgtttgtgcgtcgctgcgggcggaaagacctatgagagcggagaggcggcctttacgaccgatgcgggcgacgggcccggacccggtccgaatccggggctgacgaagttttcgggctggcccgaactgcccgtcgaggtgaagaacggcgattaccattacgcctaccatacgatcagcgacttcaaggtcggaaactacaacgcccgcaactacacggtatgttacagcgccgagaatcacggtcccgtatgggtggccgcgccgctgcacaactgttatgtgaccaagagcgggaaccgcagctacagtcaggatccggatgttccggcgggcatacagccggcgtcgaagtccctcgccgatccctacaacaagggccacatgctgggcaaccgcgaacgttcgagaacggccgtcatgcgcaggcaggtctgctattacaccaatatcgcgccccagcacagcgggaccttcaatacgggcggcggcgcgtggaacaacctcgaagacgtgatcgacaagtattgggacgcgaccaagaattccagtgtcggcgatacgctttatgtggtcgtcggggcttactacaagacgtggaccgactcgtacggcaatacggcttcgcccaagaaggccgccttcggcggtcagcaggcgggcgttccgaccatgttctactacgccatgctgcggacgaagaacgccaagtccggcaaatcggtgctgcactgttcgcgcgaggagttgcagtgcgcggccttcgtgatgagccacgccatgcagaaggggcacaaaccctcgcgcagcgatatgcgcagcgtcgcggaggtcgagcggctgagcgggttccagttctttaccaacgtgcccaatgcgcccaaggatacctataacccttcggactggggattgtagcgatgtatgcgtggggcgataacaggcggttcaactcctattcggggtattttcgccgcatgttcggctgccgcgtgcagaaactgtcggtggacgccgggttcacgtgtcccaaccgggacggaacgataagcgggggaggatgtacgttctgcaacaacggggcgttcactccctcgtactgcgtgccggccaagggggtgcggcggcagatcgaggaggggatcgagttccaccgcaggcgttaccgcacggcgtcgaagtatctggtctacttccagtcgttttcgaacacctatgcgccgctggagcggctgaaggaggtgtacggcgaggcgctggcgcatcccgacgtggcgggcatcgtcgtcggcacgcggcccgactgcgtggacgccgaaaagctggactatttcgcggagctggcgcgcgggaggtacgtggccgtcgagtacggcatcgaatcgacccgcgacgagacgctgcgggcggtgaaccgcgggcatgacttcgcctgcgcgcgccgcgccgtggagatgaccgccgcgcgggggctgcacgtcggggcgcactttatcctcggactgccgggcgagacggacgcgatgctgctggagcaggtcgcggcgatcaattcgctgccgctcacgacgctgaaattccatcagctgcagctcttccgcggcacggcgatggccgccgaatacgacgccgaccccggccgcttccgcttctgggagatcggcgagtacatcgacctttttgtcgaggtgctgcgccgcctgcggcccgatctggtcgtcgaacggttcgcgagcgaggcgccgccccgctaccattacggccgcaactgggggctggtgcgcaacgaacagctgctggcgatgctcgaaaaaagattggaggaacgaaatgcgtatcaaggcgaaatttttgtacctttacagtcgctgcgataggttcgaacttgcttttgccctcagtttgcactatctttgcctttgcaattgctaatatttccgtaccgaaatgaaacccatcattaaggagctgatgctgaagcccgtcaaggagtatttcctgatgacggtcggcatgatcatgtactctttcgcgtggatcggctgcatcctgcccgccaaaggcgtcggcggaggggccgcgggtctgtcgctcgtgttgtgccatgccgtcgaggagtggctcggcgtctcgattcagatcggtacgatggtattcatcatcaacggaatactgctgctgatcgcgggattcatcatcggctggaacttcggcgtgaagaccgtctactgcgtcgtggtgatctcgctggggatgaacttctggcagtcggtgctgccggagggcgacttcctccacctcgaacgtattctgtcggtgatcctcggcggcatactggccggcatgggcgtggcgatgtgcttcgcgcagggcggctcgacgggcggcacggacatcgccgcgatgatcatcaacaagtaccgcacgatcagctacggcaagatcgtcatctactcggatttcgtcatcatcggatcgtcgatgctcgtgggattccatatcgacacggtgatctacggctatgtgatgacggcggtcttcggctatacggtcgatatgatcatggccgggaaccagcagtcgagtcaggtcttcatcgtgacgcacgactatgagaagatggcggaggccatcgtcgagaatatccaccgcggcgtgacgctcatcgactcgcaggggtggtacaccaagaagcagtcgaaaatcgtcatggtggtatgccgcaagcgcgagaccgcgatgatcctgaaattcgtcaagacgatagatcccgacgcctttatgaccgtggggtcggtgatgggcgtttacggcaagggatttcaggcgctcaacaaactctgatgcccctctatgccgacatagtactgccgctggcgcagcccgcctatacgttcgccgtgcccgaagggatgcacgtggcggaggggacggcggtagccgtgcagttcgggccccgcaaattctatacgggcgtcgtttggcgggtgcatgaccgccgtccgccgttcaggacaatcaaatccatacagcgcgtgctgtacgacgcgcccctgctctcggcgcagcaaaaggcgctctgggagtggatcgccgcgtactacatgtgttcggcgggcgaggtgatgcgcgtggcgctgccgtcgctgatgaagccttcgggcgataccgaggaggagttcgccgaagacgagttccgcccccgcacggagtgctacgtggcgctggcgcgggagctgcacgacgaagggcgcctgcacgaggtcttcgagaagctcggacggcgcgcgcccaagcagtacgaagccctgctggagatcgcgtcggcgggggacgagacccggatttcgacgggcgaggtggcccgccgcctgctgcgggccgactatgccgtgctgcatgcgctggagcgcaaggggcatatcgtctgcacggagcgcgaacgcaccgtcgagcggggcggctcggcgttccggctgcccgaactgaccgcgccgcagcgcgaagcgctcggttcgctgcgggagcagttcgccgaaaagcctgcggcgctgctgcacggcgtgacggggtcggggaagaccgaaatttacatacacctgatcgccgaaacgctggcgcggggcggcgacgtgctgctgctcgtgcccgaaatcgccctgacggcgcagctgatcgggcgcatggagcgcatcttcggcagccgcgtgaccccctatcattcgaaacttacgaaccgccgccgcacggagacctacctgcggctgaaccgctcccaagggggcgagttcgtcgttggcgtgcggtcgtcgatatttctgccgctcaggcatctgcagctgataatcgtggacgaggagcacgacgccagctacaagcaggccgatcccgcgccccgctacaacgcccgcgactgcgccgtggtgatggcccgcctgtggggcggccgcacgctgctgggaagcgccacgccgtcgctcgaaacgtggctcaacgccgagggcgggaagtacggccgcgccgtgctggcggagcgttacggcgacgcccggccgcccgaaatattcgtttcggatacgatccgcgccgccaagcgcggcgagcggcatgcgcatttcaacaaactgctgctggacaagatggaagagacgctggggcggggcgagcaggtgatgctgttccagaaccgccgcggattctcgccctacgtcgagtgttctcagtgcgggtggacggcccgctgtccgcactgcaacgtgacgctgacctaccacaagggcggcgccagactcgtctgccactactgcggttacacggtcccggtgccggcgaagtgcccttcgtgcgaggtgacggaggtgctgccgcggggattcggcacggagaaggtcgaggaggagatcgcccggctcttccccgaagcccgcgtcgcccggctggaccgcgacagcgtgacctccgagcgggcgttcaacgccataatctccgatttcgaagcccgcaagaccgatattctggtcgggacgcagatgattacgaagggattcgacttcggcggcgtgtcgctggtggggattctcaatgccgacaacctgctgaacaaccccgatttcagggctgcggagcgggcctttcagctcatgctgcaggtcgccggacgcgccggacgccgctcggacggcggcgaggtggtgattcagacctccgagccggggcatcccgtgatccggcaggtcgtggcgggcgatttcgccgggatggcccgcatgcagctctccgaacgcgaagcgttcttctatccgccctatgcgcggctgacctcgctgacgctgcgccaccgcgacgtcgcgctgctgcgccgcggcgtcacggagctggcggcgcgcctgcgcgtcaggttcggccgccgcgtgctggggccgatgacgcccccggtggaccgcatccgcggcgagtatctcgcgggtctgttgctcaagatcgaaagcggcgcttcgtcggccaaggcccgcgcactgctggccgccgagctgaaggcgttcgccgaaaatcccgaattcaaaacgatcaccttcatctgcaatgtcgatcctcagtgacctgctgcgcgacgtcgcggcgcttttctttccgccgcgctgccccgtctgcggcgtcccgctcgcgcagggcgaacgcacggtgtgcacgctgtgccgcacgacggcgcccctgacggggttctggcttgaggcggacaatcccctgctggcgaagtgccgggacatgctgcccgtcgagcgggcttcgggttttctctactacattcacggaagcgggtggcgggagctgatccgcggattcaaataccgcggagcgtggcgcacggcccgcgcgatgggcgagtggtacggacgctgtctgaaggagagcgggctgtacgacggggtggaggtggtcgtgcccctgccgctgcaccccgtcaagcggtgcaggagggggtataaccagtcggagtacatcgccgaggggatcgcctcgcagctgggagcggaggtagaccgccggagcgtccgccgcaagcgcaatacggagagtcaggccctcaagccgcggcgcgagcgcgcccggaacgtggacgaggctttcgcggtgcgccgtcccgaacggctcgaagggcggcatgtactgctggtggacgacgtcttcacgacgggcagcacgatgctttcgtgcgccggggagatgctgcgcgccgcacccggatgccggatcagcatcgcggcgctcgccgtctcgcggcgggagctgggggtgagggagtgatcggaaattaaaaattctttttcaacaggcgttatcccctgctgcggggactgtttgcgggagaatcgtgtcatcaacatgattttcgataacaactttgccgcggccgttttgttttctccgcccgaatcgctatttttgggctctgaacgaaaggataaatcatggctaaagattataacccctcccagcgcaacagggaggcattcgaggcgctgaccgacaccgccggcaacgtgcccccgcaggcggtcgaactggaggaagccgtgctcggcgcgctgatgctggaaaaggacagcattatcgccgtgcaggagtacgtcacgcccgacgctttttacaccgaggagcaccgcacgatctaccgcgccatcgaggagctttcgatggagctcaaaccgatcgacctctataccgtcaccgagcggctcaaggccaagaaggagctgaagaaggtgggcggcgcgtcgtatctggcgcagctgacgcagaaggtcggctcggccgcaaacgtcgaatttcacgccaagatcatcgcccagaagtacgtgcagcgcgagctgatccgctcggcgaccgagattcagaagcggtcgtacgacgaatcgaccgacgtgacggagctgatcggatatgccgagggcgagatattcaaggtggccgaaggacacgtcaagcggtcggtgcaggcgtcgaaggatattctggcccgcgcgctgatgcagatcgaggaggcgtcgaagaatacgagcgccttcaacggcgtgccgtcgggctttatggccatcgaccgcgtgacgctgggctggcagctctcggacctgatcatcatcgcagcacgcccttcgatgggcaagacggcgttcgtgctctcgatggcccgcaacatggcggtcgatcacgagcagggcgtggcgttcttctcgctcgaaatgtccgccgtacagctgatgatgcgtttgattatcgctgagacgggactgagcggaaacgacgtcaagtcgggccgtctgacgcccgaacagtggcggcatctggaatcggcgaccaagccgctgggcagtgcgccgctctatatcgacgacacgccggcgctttcggtcttcgaattccgctcgaaggcccgccgtctgaagatacatcacgacatcaagatcatcatcatcgactacctgcagctgatgaccggcaatcaggattcgaaaggaaaccgcgagcaggaggtggcctttatttcgcgtacgctcaaggcgatcgccaaggagctgaacgtgccgatgatcgcgctgtcgcagctgagccgcgccaccgaaatgcgcggcggctcgaagcgtccccagctctcggacctccgcgagtcgggcgccatcgagcaggacgccgacatcgtggccttcatccaccgtccggagtattacggcatcaatcaggacgagaacggcatgccgacggcgggtatggccgagatcatcctcgccaagcaccgtaacggcgccgtgtgcgacgtcaacctgcgcttcctcaaggagcaggcgcgtttcgccgacgtggatgacacgatgctgccgccgtcgcaggcggctgacagccagcaggcctacgacgactatgccagcggttcgaacgccgtgccgggagccggaatcggcggcggactgggcgcgggaatcggcggcggggagttcgaccccaatccgcccgcgctgaacgacgaggcgccgttttagaaggggcgccgttttggagggatgctgcggccggagcggaaggtgcggccgatatggtcggagaagtcggtgcggctgaggcggtcggtgcaggcgatgcaggcagtgcggtcagtgcggccgactgtggaagaggcaggtaacagaatggttaattgataatatttttctgatagatgtttgtccggacctatgcaggagcgatcgtggggatcgatgccgcggcggtgaccgtcgaggtcaatatcgccggcggcggactgggaatgtacctcgtggggctgccggacagcgccgtgaaggagagcgagcagcgcatacgtgcggcgttcgagaactccggggagcggatgtcgggccgcaaggtggtcgtgagtctggctccggccgacctgcgcaaggagggcgcgtcgttcgacctgccgatcgccgtcgggattctcgcggcgatgtcgcgggtgaatgccgaaacgcttgccgggacgatgttcgccggggagctgtcgctggacgggacgctgaaacccgtgcggggcgtgctgccgatggcggtgcgcgcgcgggaagagggattgcggcggctggtgctgccggcggcgaatgccgcggaggcggccgtggtcgaaggcgtcgaggtgatcggggccggaagcctgaaggaggtgatcggactgctgaacggcgaacgggagatgacgccggcggtgcctgcggacggggagccgttcggggcggaggcgggccgttatgaagaggattttgccgatgtgaagggccagacgcatgtgaagcgtgcgctggagatagccgccgcgggcggtcacaacgtgctgatgatcggggcgccgggttcgggcaagacgatgctggcccgcaggatgccgaccatcctgccgccgctgtcgcgcgaagaggcgctggagaccaccaagatacactccgtggccgggaatatggcggcgggcggcctgctggcgcggcggcctttcagggcgccgcaccatacgatttcgcaggcggcgctgatcggcgggggacagtcgccgcggcccggcgaggtgtcgctggcccacaacggggtgctgtttctcgacgagctgcccgaattcgggcgcagcgtgctggaggtgctgcggcagccgctggaggagaagagggtgaccgtctcgcgggcgaaatacagtgtggaatatcccgccaactttacgctggtggcggcgatgaacccctgtccgtgcggctattacaaccatccggcgaaggagtgcgtatgttcgccgggggcggtgcaccgctatatgagccggatttcgggaccgctgatggaccggatcgacctgcatgtggaggtgacgcccgtgccggcggccgaactttcggcggcggcgcccggcgagccgagcgccgcggtccgcgagcgggtcgtgcgggcgcgggaggtgcaggcggcgcgtttcgcggggacggagggcgtgcataccaacgccatgatgaacgtggcgatgctgcgcgaatactgtcggccggacgccgcttcggcggcgctgctggagcgggccatggagcggctgtcgctctcggcgcgggcttacgaccgcattctgaaagtggcccgcacgatcgccgatctggcggggcgcgaaaccatagcggcggccgatgtggccgaagcgatcaactaccgctcgctggaccggggaaactgggggcggtaaaaggaggacgaaagggcggcgaacggaaagaattcgtaattttgcaggcggcttgccttggaatgttgtccggggcggaagtctgcaccccggttttcagatcgccgggtttccggatcgccgggtttccggaccgccgggtttccggaccgccggggacggccctcggattagcgggctgccgggttagcaggctgtcggggcttcgggccgggccgccggggcggtgccgcggtcgggcctttgagttgtcgggatcttcgggctttcgggttgacgggccgtcggatcttcggacagtcggaggcgggttgaaagatattgattgtaagtaaaaaagataaaatagcatgacaaggaaaatcatcctttcgggcggcggaacgggcggacatatctatccggccgtggctgttgcggaagcgttgaaacggcggttcggcgacggggtcgagattctcttcgtgggcgccgagggcaagatggagatggagaaggtgcccgcgctgggctaccgcatcgtgggactgcccatagcgggtctgcagcggcgcatggactggcacaacctcgcggtgccgttcaaggtgctgaagagcgtctcgatggccaagaagaccattcgtgaattcggggccgatgcggtcgtgggattcggcggctatgccagcgctccggtgctgtgggccgcgcagcggctgggcgtgccgacggtgattcaggagcagaactcctatgccgggctgaccaacaagattctggccaagcgtgcgaagcgcatctgcgtcgcctatgaggggatggagcgtttctttccggccggcaggatcacgatgacgggcaatcccctgcggggccgtttctcgaaagagggggccgaccggggcgaagcgttggaatattacggctttacgcccgatcttccggtggtgctggtcgtgggcggatcgctcggaacgcggtcgctgaacgagatgatgaaggcgtggatactcgcgctcgaaggcgcggacgctcccgtgcaggtgatctggcagacgggcaaatattatgagcgcgagatgcaggcgttcttggcggcgcatccggttgcgaatatctggcagggggccttcatcgaccgcatggactatgcctatgcggcggccgatctggtcctctcgcgcagcggggcggggactgtctcggagttgtgtctggtggcgaagcccgtgttgttcgtgccctcgcccaatgtggccgaggatcatcagaccaagaatgccaaggcgctggaagccaagggcgcggcggtcgtggtgcccgatgccgaggcccggacggcggccatgaggcgggcgatggagctgctctcggacaaggaggctttgcggacgatgagcgaaaacctcgaaaagctggcgcgccccgatgcggcggagcggatcgtggatgaaatcgaaaaggtaatgaaatagcgccgcttccggcgtttcccctgcgccgcgcggcgggtgtttttgccgtgcgggcgatgaatgcggcggggaccgtgcggagggaggagcggtgcggagaacgataaaacttaatcggatggagtttcaaaatatctattttctgggaatcggcggcatcggcatgagcgccttggcgcgttatttcctgcatgaaggcaagcgggtggccggttacgaccgcaccccctcgcatctgacggacgaactggcggccgaaggtgctgcgattcatttcgaggacgacgtgcggcggattcccgcggagtttctcgacccggcggcgacgatggtggtgtataccccggccgtgccgcaggagcacggggagtatcaatatttcgtgagtcacgggttctgcgtcgagaagcgttcgcagatgttgggacatctcgccgagggcaagtatgtgatggccgtggcggggacgcacggcaagaccacgacctcgacgctcgtggcgtggctcaaccgcggcgtgacgggcggaggaagcgcttttctgggcggaatatcgaagaacttcggcggcaatctggtgctgggcgcgggggcgcggctggcggtcgaggccgacgagttcgaccgttcgttcctgcggttgtatcccgacgtggcggtgattacctcggcggatgccgatcacctcgatatttacggcacgcacgaggcggtgaaggaggctttttcgcagttcgtgcggcagatcaggccgggcgggttcctcattatcaaagagggggtggatatcgtgctggacaatccgcagatcaccgtttaccgctattcgtacgacgtgccgtgcgacttctacgcccgcaacgtgcagctgctcgaaggcgggcattaccgctatgacattgtgacgcccggcggcgtggtcgaggggtgcacgctcggcattccgggatgggtcaatatcgagaattcggtggcggccgcggcgtcggtatggtgcgcggcgcaggccgaaggcacgacgctcgatgcggaacggctgagagaggcgctggcgtcgtttgcgggcgtgaagcggcgtttcgaattctatgtcaatacgccgaagcaggtttacatggacgactacgcccaccatccgcgcgagctggcggcgacgctgacgtcggtgcgcaaaatgtttccgggacggcgcatcacggcgctgttccagccgcacctctacacgcggacgcgcgacctttacagggagttcgccgaggcgctgtcgcatgccgacgacgtggtgctgctgccgatctacccggcgcgcgaggagccgatcgaaggcgtgacgtcggagatcatcgcccaaggcgtgacggtgccgtgccgcatcgtggagcgggcggcgctggccgatacggtggcggcgatggacacggacgtggtggtgagcttcggtgcgggcaacatcgacgcctgctgcggggcgatcgccgaaaagctgaaagcgaagagttagccgggagaacggcggccggggcgcatgtccgccgggccggatgtaaaaaccgcagaagacgaaacgacggataattagagaataaagacgattttgagaaaatacctccgatacgcactgctcacgcttttgtggggcgccgtggccgcatatgtcgtttatgcggggacggcggcggggaggctgcgtgccgggaagaaggtcggcagggtcgagatcgaggtggtggacagctcgtcgatgggctatctggtgtcgggccgcatggtgcgcgagtggatcgcgcacagcggaatcaagacgaacggcacggcagttgatgcggtagagctggcggccatcgaggccctgatcgccaaaaacggattcgtggagcgcgtggacgcctatgtgacttacggcggcgtgctgcatatcgacatcagccagcgcaggcccctgctgcggctgctgaccgacggcgtggattcgtacgtcacgcccgaaggctatgtcttcgccgcgccgcgcgcctcgtcgctctacgtgccggtggtgacgggggcttaccgtccgccgtttcccgcgtcgttcgtcggctccgtgcgcgggcatatcgacctcgaacgggcgaagatcgacaagcggatcgcggagctggagcgtgagaagtaccccttcttccggcgcgaactgcagaacgaccgcaacatatcggcgctgcgccgcatgcgcatcaagaagcagtggtggcggatggaaagctccgcggcgttcgacgcgcgcgtcgaagagctgcgcgcccgcaaggcggagctgcggcgcaaataccgctacgaagcgcgtctggtgcaggagggaatagaccgcatcgcgcagcggcaggaggccgaaaggctgaaacaaaaaaagttggagaaaagctacgaagatttcatgaaactgcttacctttgtagagttcatcgaagatgatgacttctggaggtcggaggtggtgcagattgccgcgcatacgacccccagcggagctttagaggtggagctggtgccccggagcggccgccataccatcgtcttcggacgtatcgagcaggtggagcgcaaattcgacaaattgctgcgtttctaccgcagcggtcttatgaacatcggctggggggagtaccggacgatagatatcagatacaacgatcaggtggtttgcaagaaataaaaggattataccgtggaaagaaagaattataccgttgccgtcgatctgggttcgtcgaacgtcgtggtggctgtcggcgagaagaacgccgaagagcggctcgatgtggtgtgcgtcgtgtcgaaacccgtcgagggggtcaatgcgggcaagattgagaatatcgaactggtgagccgcgccatccgcgaagccgtgtcggaggccgaggagcagttgggaatccgcatcaccgaggcctatgccggtatttcgggcgacttcgtgcgctgtgcccggcatatggaccacgtcttcgtctacgatccgcagaacggtgtcaatcagaaggacgtcgatgcgctgttcgaccgcatgcgcaacgtgcaggcgcccgacgacgagaccatcatggaccgcgtaccccagaactatgtggtggacgacaatcaggaggtgaagaatcccgtggggtcgttcggcaagaagctctcttccacgttcaacttcatcctctgtctcaagaccccgatgcagcggctcgacatggccctcaaacgggtgggaatcaagatgctgagcgttacgtcgaacgccatagccacggccgaggcggtgctgctgcccgacgagaaggaggaaggcgtggccgtggtggatatcggcggcggcgtgaccgacgtggcggtttactaccgcaacgtggtgcgttatatcgccacgatcccgatgggggcgacggcgatcaaccgcgacatccgcacgatgagcgtgcccgaaaagcatgtggaaagtctcaaacagaaatacggctcggcggtggccgagctggctcccgaagacaaactgatccgcgtgaacggccgcacggcccgcgaggcgaaggatattctgctgcgcaatctggcgacggtgatcgaagcccgcgccacggatatcgcggagttcgtattgcaggagatcaaggattcgggatatatcggcaagctggcttacgggatcgttctgacgggcggttcggccaagctgaaggacctcgacgaactgttccgccgggtgacgggcatggatgtgcgcgtcgcgtcggccgagaccgggattgccgaggagtcgaaagagaaggccgccgatccggcttacgccacggcggtcggcattctgctgaaaggcgccgagcagggcgcctgcgcatttgtcgagcggcccgtggcccggcctgcggaacagcagggcttccggcccccgcagccgcagcccgctcctgagttccgccacacgccgcgcttccagcagcctgtgcaggcgccgcccgcagctccggcggcggaagaggcggaggaggatgccgctgcggaacgtgaggaggccccggtgatcgaacccaagcgcaagcgcgactggggctcgattttccagaagaccttcgacaagatcaacaagagtttcacggcggccgaggacgaagagatttaagggataatttgccgcgccccggtgtccggcccacgcggcggtcttacggcggtgtttgcggcatgaatttcgtgcttgcgggggcggtccggcgatgcggccgcggttaacgccggtttcggccggggagcggtttttgcagatgtggcggacagccgggggaaattcggacggcgggattcagcggacggcggatgccgcggatgccgggagctgcggacgggacgccgggcagcggttttttgaattccgcggattgcggacggagagccggatggcggagtctgtagatgccgcggactgtgaacggtcggcgggaatgggtagatgccgcggggtgccgacgaagattcggacggcgggattcagcggatgtcgggaactgcagacgggaagccggctgcgggaatgatttatagttaagaatgtggagaaaggagttagagatatgacagacgaattgatgtcggagatcaaagccccgaagacggacggttcgatcattatggtggtgggcgtcggcggtgccggcggcaatgccgtgaaccatatgtggaacctcggtatacggggtgtgacgtttctggtttgtaacaccgaccagcaggcgctggacaagagtcccgtggagttgaagatacgcctcggcgcagagggactgggggccggaaacgacccggaaaacggccgccgcgcggccgtggagtcgctgccggagattcgtcagcacctcgaagagtcggggacgcgcatgctcttcatcacggcgggcatgggcggcggaacgggtacgggcgcgtcgcccgtcatcgccaagctggccaaggagatgggactgctgaccgtggcgatcgtcacttcgccgctggccgtcgaaggcaagatccgctacgagcaggctttcaggggcatcgaggagctgcggcagaacgtggattcgctgctgatcatcaataacgagaatattctcgaaatatacggacgcctgtcgctcaagcaggcgttcggcaaggccgacgacattctgtgttcggcggccaagggcatcgccgagatcatcacggtggagagcgacttggtgaacgtcgatttcgccgacgtgtcgaaggtcatgcgagacagcggccgcgcccatatggccgtggcgacggccgagggcgacaaccgcgccgaagcggcggccgaagcgtcgctgcgttcgccgctcttggaccacaacctgatttcgggggcgaagaacatcctgctcaacatctcggtcgcggatgccgacggcctgatgtacgaggaggtggtgcggattctggagtacattcaggcgcacgccagcgtgcaggacgacaacggcgtgattcacaacgccaatatcatatggggtacgagcgagaagccccagttgggcaacgccatcgagctggtggtcgtggccacgggattcgcgggcgacgtatcggcggcggggacgatgaagcagatcattcctccggtgcggaatgtcgagccggtgaaggacccggtggctcccgtgctggagccgatcaagccggtcgtaccgcccaaggccgccgtgcagcggccgcccgaacaggtgatgctgggggcgaaatcgacgcgttacagcaacatcgaactgttgctgagcaagcccgcctatcagtcgcgcaactcgaaattcgtcgtgcagatgcccggcggacgcaaggaggtgctgaaggaggagaacgatgccggccagcaggcgcagcaggatgcgcagggcggatcgctttttgattaactaatagaccgccggtttggaggagactacaacttcgtggattacgtttaacgggttttcggcccatatcgccgtgctgtgtgcggtgacgctgggcctgctgtgcgtttcggcgctcgtgtcgggcgctgaaacttcgtttttttctctgtcgcacaacgatatacgccgcctgcgcaaacgcacgacggcgtcggccgaggcggtgctccgcctgctgacgaacgtggacctgctgctggcgacgattctcgtggtgaacaatctggtgaatatctgcatcgtcatcctcacgtcgagcatcatagattcggttttcaccttcctgcggttcgaattcctcttcaagaccgtactggtgaccttcctgctgctgctcttcggcgagatactgcccaaggtgctggcgcagaccattcccgtgcgcttcgcgcagttcgccgcgcggcccctcacggtgctgcggtggattttctatccgatctcctatgcgctcgtgcggacgagcagccgcatcagcgagaaggcttcgcacaagagcgagatttcgctcgacgagctggccgacgcggtggacatgacccagagttcgagtcctgaggagcatgtgatgctgtcgggaatcgtcaatttcgtcaataccgaggtgcaggagatcatgaagccccgcgtggacatcacggtgctcaacataaccgacgattacgagacggtcaagaagaccattatcgagtcgggattttcgcgcatccccgtctacgaggacgacatagacaacatcaagggaacgctttatgtcaaggacctgctgccctacatcaaccacggcagcgagttcggctggcagcagctggtgcgcaagccctatttcgtaccggaacacaagaagatcaacgacctgctggccgacttccagtccaacaagatccatatggcgatcgtcgtggacgagtacggctcgacgctgggactggtgtcgctggaggatatcatcgaagagatcgtgggcgagatttcggacgaaagcgacgccgacgaaagtttcttcacgcggctcgacgagaaatgtttcatcttcgacggcaagagccatctgggcgacttcgaacgggtgctggggctggacgaggagattttcaacgacgtgaagggcgaggccgagacgctggccgggctgatgctcgaactcaagcgcgacttcccccgcaagggcgacgtctttacgtcgcacgacatccgttttacggtgcaggagatggacgggcaccgtatcgacaaaatccgtgtagatttgctggcatgacgaaggggctcttcatcgagccgccgatgaccgaggcggaagccgctgcgcgggtgacgcccggcgagcgggccgccgcgcaggagtttctgcgcgaacgccgccgcagggaattcctgacatggcgcgccgtcgtacgccgcgagctgggggacgacgtgcagatcgcctatgatgaggcgggggcgcccgtcattcgggggcgcgaggtgcatatcggggtttcgcactgtccgggccgggtagcggtctgcatatcggatgcgccgtgcgccgtcgatatagagccggagtcgcgggatttcagccgcgccgcgtcgcgttacatgtcgcctgccgagcgggcgctttctgacgatccgttgctgccggccgcagtctggtgcgcgaaggagaccctatacaaatatgccgggcggccggggctggatatgctgtacgacctgcatgtcgaggcggtcgatttcgaagccggagtcgtcgtggggcgtatcgcggacggggagccgctgcggctttcgcttaagcgcgccgacgggtttatcgttgtatatattttgtagtttcggggcgtgtacccgataataatcctctaaaatcctgctgggagccgtgcggctgaagctggaagtcgaggggaatgcgggggcggaaccggggttaggattgccggagcggatgaggataaggccggagggaccgaggggctgcctgcggggttgcttgtgggatggagtcgggatttgctgcgtctgccggaagagagtggccggattgccgttgtctcagaaggcttccgaagcggtgaagaggaatgccgaggagcgtttgcggtcccacgggaggttgtggttgccgtagacgccccagccgtagtcgagacggatgttcatgcggttcttgaattcgaagcggtagccgcagccgaaactgtagagcgtattgtcccaccggaatttgtcggtgccccagacctgaccgccgccgatccagcccacgatgccgtgacggcggtagattttctgccgcagttcgatctgcgtctcgacgagccgtttgtcgcggtaacgcccctcgtaatagccgcgcatgcgttccatgccgcccagcttggcgtacatgtgccacgacggggtgcccgccgtgcagtcggcatagagatcgtaggcgaagatggcgcctttccagagtttctgatagaagtcgaacgtcagtgtgaaacgcccgaagttacggcgcgtattgcccagccactggggataccatttggcttcggccttgatgaagatgcctttcgaggcgttgaaggtcacgtcgcgcgtgtcgtactgcgcgaaaatgccgagattggtgttgaaggcgttcggtttgtcgcccgtggcggcgatgaagttcgagaaggggtcctgtttctccgggtcgtaacgtttgttgtccttatataaatcgtagagttcgccgatttgaccgccgggtttttccttttcgtggttgtcgattgcggtgaagtactctcccatgccgctcgacttgtatttggcgccggtgtagtcgatgccgccgctgacgccgatgtagaaccgtccgacgagcgacgtgcagtaggagatgcggaaaatgcccatcgtcgtggtcaggtcctgcgcgtaaccctcttttccggccttgtggcccacgccgtagaatgcgcccggaaagtagacgaaggctcccgaatagctcagacgccgtttgttgtgctggaagatgttgtcgcccgaaaagcggagcagcaggaatttttgggtcgtgatgttgccgtagatcgagatgttggagggagcggtcaccgagtccgtgcggtcgagacggtacagaccggcgacgaggaagcccagaccgaagccgacgtcggacgagtagttgggaccgggggcgaggctccagtcgatctttttctcgaacgtgcggtccacgttcgagcggctgtagtagtcgatgatccggcggatgaagcccttgcgctgggcggacgtcgtgagcgctgccgtgtcggcgggctggcggcccggccgcgcttcggccgcgccgatacgggacagagcctcctgagtcgaaggaaaattgtctttcgaggtgtcggtggtttgggccgttgtcgtaaatatcgtcagcaacaggctgacagttaggaagatcctatatcccttttccattaaaagtgaggttgaaagcggtttaaagatagcaatttttcgccaatgttcaaaatggacacattcagggcgttcggggtttcccgatacggagataaatttctatctttgcagggaccggtgccggcccgtccgactgtgggacttgtccggctgtgggatccgtttgctgtccggcccgatgattgccggacacgctgattgcccgataggcccggttgccggatcggaaatttgccggacccgatgatgtcggatcattattgaactgcatggaaattacacgccccgtaccttcgccgaatccggttgaacagaccgacgccgctctgctgcagaccgcagaggaggtgtccgatgcggttttccgcagcgtgcccctgcccccgctgatgcgcgagcatttctgggtgcagtcgtcggtgtttgcgggttgcattttcccggcgcccgtgttgcagggttctcattttacggacgtcacgttccgaaactgcgatctctcgaacgccgatttgtcgggatgcagtttccagcgggtcgaattcgtggagtgcaagctggtcggcgccaacctttcggaggggacgtggcagcatgtcgttttcgaacgctgcaagatggaattcgccaattttacgctgggaaaattccggggcgtccgttttgccggcggaacgatgcgcagcgtcggattcgacgaatgccggttcgaacgtgtggagttctcgctctgcgaccttacgatggcggaattcagtcggacacggttgaaggggctttcgttcgtcgattcggatattcgcggaatccgggtaggcgataccggatcgttcgagctgaaaggtttgaaagtcagtgcgctgcaggcttcggagctggcgcgtcttctgggactggaaatcgaggagtaattgttattcaaaaaatttacataattcttaaaaaatattaataaaaatgtttggaagtttgttttccgggcattacctttgtcgcatcttagatgataaaatattttaagaattatttaaaattatttagtatgaaggcgaagatcaatgcgtggttccgtaccgctatggttctgttgggagagagcatcaaactgagagcgatgtaaggctccccttttttgagacaacaataaaacttcgatatacgaaagagtcccggctttacggccgggactcttttattttgggtttccgcgggggcgagctggattgcatccgggatgcagggtgaagtgcgccggatttcagcagtttgttcccaccgggttgctcccgctgaacggtcctgccggcggccggcccggaactgttcagcggactgcggtatcggagcgctccgctgaattgttccgccgtttcgtacggtcggcttgtttcacgggactgctccgtccgctatttgagccccagccgcttggcggtctccttgggcagcgcgttcttgttgaccatgatcgaagtggtcttgtactcgacgaacggccgcgagaagtaccagaacccgtcgtagggcgggcgtacgtcccacgaattctggaccttgaagtagcggttgccggcctgatcggtcgccgtgcccatgatgaccatgccgtggtcgtcggtggtctcgtagttgtcgaacgcctgctggcgcatctcctgcgtgattctcagctccttgccgggcttgtcgaacttatagagcgcatcgtccttctccttctgggtcagtttgccccagcgctcggcttcggtgccgtccatgttcgcaaggtcggcttcggggatgatgccgatggctttcgtacggctgaaacccttctcgctcacgtcggtgccccacgatacggggtagccgttggccagcgcgttgtcgatgacggtcatcatctcgtcgagcggcaggttgtagaccgtgccccacatccagttgtcgggaatctcgatgatgaactgcgtatagaacggatgatgcgtgaaggaggtgatgtcgatgtagtcgtccatgtcgatcggcagcgatgcggcgaacgaccggggcgtatactccttgccctcgtaggtgaatgtttcgggcatccggccgaaatactcgtcgaggatggcgtcgaagccgcgtttccatgccgtcgaaagcgctttgtccgaggatttgccgctggctgtgatcacggcgtcgaggtaggccttcagcacgagcgacagttcgtggaaatcggctttctcggtgccgtagttgaagcccggataggcctcctgcggtacgatgccgtggttcttgattccttcggtcacgtcgtgcgaagcgccgccctcggcgaagttgatctcgccgtgcatgcggacgtatttcacggccttgtccatgaacgtgtggcgcacgatccacatctcggagaggtggaccggacggccgccggcgcgcaggatctcgccttcgaggaacgagagggtcgagtagcaccagcaggtgccgctgcggtgctggtccttgaccggggtcatggggatcagcctgacgtcggtgaatcggtatccctccggctcggttgcggcgggagtctgcgctgcggccgcgaaggcggtgcagaacgcaagggctgtcagcaggaattttttcatcgcttgtgctgtttgggtattggtgttcggttacttcttcgaggaagagacgatcttccggcactcttcgagcgtcagcgtctctggcttggcgcctttctgtaggcggtaattcttgcctttgtaggcgatatagggtccgtaacggccgttcttgaccagcatgtcgggatcttcggggaagctgcgcagcggagtgttggccgcggctgcggcagcctgctgggcgcgcacgacctccacggcgcgctcgtaggtgagcgtgtaggggtcgtcgcccttctgaagcgaggcgaacgacttgccgtggcgcacgtagggcccgtatttgccgatgccgaccgagagctgctcgccctccagctcgccgaggtcgcggggcagggcgaaaagctccagcgcctcttcgagcgtgatcgactcgatcagctggcccttcttgagcgacgcgaagcgtcccttttcgccttcgttgccttcgatctcgaccatcgggccgtagcggccgatgcgggccttgacgacatgtccggttttggggtcgttgcccagaatgcgggcctgactcttcttgtcggtctgcgtgccgatggccgtatcgaccatctggtggaagggtccgtagaagtcgtggatcatcgtgtcccaagtgatgtcgccgtcggccacgcggtcgaactccttctcgacgttggccgtgaaattgtagtccatgatgggtttgaactgcgtttcgaggtagtcgttgacgaccatgccgatgtccgtgggcgaaaggcggttcttctccttgccgaagttctccgtgaggttcttcgaggtgagtttgtcgcccgtgagcatgagctggacgtagccgcgtttctgaccgtccttgttctgtttgaccacgtaaccgcggttgatgatcgtggtgatggtcggggcgtaggtcgaaggacggccgatgcccagctcttcgagccgcttgaccagcgacgcctcgttatagcgggccggggcctgcgtgaagcgctccgtcgcggtgatctgggtcgaaacgacccggtcgcccgcggtcatcttgggcagcaggccctcgccgctctcggcggcctgatcgtcgtcggtggactcggagtagagacgcaggaaaccgtcgaaacggaccacttcgcccgtggcgacgaactgctgcgacgagccggacatgtcgatcacgaccgtcgtgcggtccaactcggcgcagaccatctgcgatgcgaccgtacgcttccagatcaggtcgtagagtttcttctcggcgggcgtgccctcgatggtgtggttctcgatgtacgacgggcggatggcctcgtgggcctcctgagcgcctttggtcttggtcttgtagttgtgccatgacgagtatttctcgccgtagagcttggtgatctcctccttgcactgggcgagcgcctgtttggagaggttcaccgagtcggtacgcatgtaggtgatcagaccctgttcgtagaggtgctgggcgacggacatcgtctgcgagacggacatgcccagcttgcggccggcctcctgctggagcgtcgaggtggtgaacggcggcgccgggaagcgctgcgcgggtttctcttcggccttggccacggtgaaggtggcgccgatgcaggtgttgaggaactcctcggcctgctcgcgggtctcgaagcgcgacgagagctcggccttgaagatcgttttgtcgggatcgccggcggcatggaactgggcgacgacgcggaagtagggcgtagaacggaaggcgatgatctcgcgttcgcgctcgacgatgagccgcacggcgacgctctgcacgcggcctgcggagagcgacggacgcaccttcttccagaggacgggcgagagctcgaagccgaccagacggtcgaggatgcggcgcgcctgctgggcgttgaccagatccatgttgaccgtgcggggctgctcgatggcttcgaggatggcccgcttggtgatttcgtggaagacgatacgcttggtcttgtcaacggggagacccaacacttcggtcaggtgccatgcgatggcttctccttcgcggtcttcatcggacgccagccagaccgttttgtccttggccagcttggtcagctcgtccaccacctttttcttgtcggccgggatttcgtagacgggtttgaatccttcgccgatgtttattcccaagtcctttttcgagaggtcgcggatgtgtccgaaactcgatttgacgacatagtccttgccgaggaatttctcgatggtttttgccttggccggggactcgacgattactaaattttcctgcatgcgtgtatgttacttttcagaaatgcgaaaacctaagtatgtcacacttaggtttcgcttttcaggctgtttgtctcttatttgatcaggttgtacgtgacgtcgatcttgatcggaacgtcctcctcggtcacgccgtcgggcgtcatgccctgaaggacgctgtacgtcgtcgtatagacgctgtaggcttcgggacccagatagatcgtgcggttcttgatcttctccttcagctcgtcccacggggcgtccgctccgagttccgccttggcggaccggtagctgttccacagactctgggcgtaacccgtgatgtccatcacatagcagccgcggctgcggttgatgtagccgccgtaagcgagcgtcgtgctgtagttctgctcgtaggcataggcgtagtcgggaatggccgaaagcgtcttgtagttggtgtaaaggcccagacgggtttgcgacttgtccatctccccgatcatatgcggcatgtcggtcagcttcgtccagtcgtaattgctgcccttgaagtagatcgacatgcggacctgagtcatggcgagcgtcttgaagttctgggcgccctcgttgcctgcgacgatctcggcttccagcgcgtcgaagaagggcttgtcgaacgtgatggcggttaccacgccgcccatgccctcgacatagatctggtcgtaggtcgggtggtcagtgatcggttttccggcctcctccttggcgtcggcgatgtcgaacttggcgtcagcgctggtcgccatgccgtagtcgcggcggatcgtattgaccgaaacgttgccgtactccgtggagatgctcgtattgtagaatatgtagcccatgtcgatcgtatccttgatcagcgtcgggtcgctctcgacgcggttgcgcgcatagaccatgaaacccgaactttcgagctccgtggcgtagatgttgcccttgcccttctccttctggtcttcggccggaacgatgtagagacccttgaactcctccacccactgcttgagactgtcggtgctgtagatcgagtagtcgtcttcgtaggcggtgcccgaacctttttggagcatcaggcggtcgatgaaattctgggttgccggggtcgtgttcatggtgaccgccgtggtggcgggacccgtcgtctcgccgtcggggaaggtgaaagtgaagaccggctcgtcgtccgcgccgataacgccctccttgacggggtcgaagttgaggtagaagaccgtgtcgcgctcggttttacccgcggcgaccggcttctcggtcaggtatttgttgctcttgatttcgtagacgttgtacttctgcggcgtgagcgtgtcgtttccgtagctggtgatcgtgatcaggatctgcgccgagtcgaagatcgggcggtagccgaaatagccctccttaaccttgtagacgttgaggtactgggtcaggaatcccgccgtgcggagtccgaacgtgtcgctgagcatcgagcccatgtagccgtaggagatgttggacgccttgagcgagtcgctctggaacagacgcgtctcgacgtatttggccgcatcgagtttccccgcgagcgtccgggcgccgagcgtcgtgtagcccaccttcatctgctggttgtccggcacgaggttcgagcccagcgtgtcgtcgaccttggtacagcccgcgaacgtcatgagggcgaccgcagccagaacggcggcggcgcggaacatgcggcggaaattattgcaatgcttcataaaatcggttgtaattatcgaaaaagtccgctgcttcgggcgactggtattcgagcatcggcttgccgcttgcgcgggcgatctccaataccttcggttcgacatccggggatgccgcgaccacaccgtcggcatactccataacgaaacggcagagattttcgtatgacggggtgtcgagaattgcgagatttttatctttgaccccttcgccggcgatcttcttgccgaaggcgttgtccagttcgccggggaaaccgtcgccgtagagcgaaacgacgatcttcacgttgcggaagatggggtcgtcggcgaaaatccgcttcaggtagaccggaatcacgctcgaaaaccagccgtggcagtggacgacggtcggggtccagcgcagtttcttgaccgtctccagcacgccgcgggcgaagaagatggcccgctcgtcgttgtccgggaaaggcttgccctcctcgtcggtcagcacgaatttgcgcgagaagtagtcgtcgttgtcgatgaaatagatctgtacgcgggctgcggggatggacgcgaccttgatgatgagctggtggtcgttgtcgtcgatgatcaggttcatgcccgacaggcggatcacctcgtggagctggtgccggcgttcgttgatgcagccgtaacgcggcatgaacgtgcgtatttcattcccacgctcctgcatcgcctgcgtgagagcgcggcaaagtccggagctttccgtctctggaagatacggggtaatctcctgacagacgtacagaatcttatttgccatggttcgagtgttttgtctttggacttccgttttcgccgccttgtatgctccggacggggccggagcggtccgggcttggcggaaacggccgctatctgttttgcaaagatagtgaaaaaatcttaaagaatgagcatcgcgtcgccgtaagtgccgaatcggtatccttcctccttggccaccttgtaggcgttcatgaccgtttcgtagccgccgaaagccgcaaccatcatcagctgcgtggagtagggcaggtggaagttggtcaccatggcgtcggccaccgtgaattcgtagggcgcgaagatgaatttgttggtccagccctccatcggcttgatcatgccgttggtcgagacggccgtttcgacggtccgcatgacggtggtgccgatggcgacgatcttgtgtccgtcgcgtttggccgaattgaccgcttcggcggcttcgtccgtcacgaagaactgctcggaatccatcttgtgtttcgagaggtcctcgacgtccaccgtgcggaagttgcccagaccgacgtgcagcgtgatgaaggacttgtcgatgcccttgatctccatgcgcttcatcaggtgcttggagaagtgcatgccggccgtcggggcggccacggcgccttcgtgccgggcgaagatcgtctggtagcgctcggcgtcctccggctcgaccttgtcgcgcacccacttgggcagcggggtctcgcccagactgaaaagcgcctgcttgaactcctcgtaggagccgtcgaacaggaaacgcagcgtgcggccgcgcgaagtggtgttgtcgatcacctcggcaaccagcaggtcgtcgtcgccgaagtagagcttgttgccgatgcggatcttgcgcgcaggatcgaccaacacgtcccacaggcgcagttcgcggttcagctcgcgcagcaggaagatctcgatctcggcgccggtcttctccttgttgccgtacagacgggccgggaagaccttggtgtcgttgaagacgaagaggtccttttcgtcgaaatactcgatgatatccttgaagatgcggtgttcgacggtgcctttggcgcggttgatgaccatcaggcgcgagtcgtcccggttttccgtcggatgtttcgccagcatttcgggggcgaattcgtacccgtattgtgataatttcatggtgaaaaaatactctttttacgtcttaaaaacaaaacagattattttctatacgcaaaaaagtctattttgtttcaagttcctccaactttttgagaaattcttcgaattcaaaggctttttcgagcgtaaagccgccgctgcgggtgcggcgcagcgacgtcaggtgggcgccgctttcgagcgcctgtccgatttcgtgggccagcgagcggatgtaggtgcctttgctgcaccgcacgcggatgcggatgcggggaaggtcgtactccagcagttccagttcgtagatgttgaccgtcgccttgcgcatcgtgacctcctcgccggcgcgggccagctcgtaggcgcgcgtgccgtcgatcttcttggccgagtagacgggaggctcctgaagccgctcgcccgtgagcgaagagagggctgcgaggaccttttcgcgcgtgatatgttcggtggggaaggtgcggtcgacggggtgttcgaggtcgtagctgggggtcgtggcgcccagcatcacgtcggcgacgtactccttctcctcggcctgcagcgcatcgaccatcttggtggcgcggccgatgcagaccagcaggatgccggtggcgagcggatcgagcgtgccggcgtggcccaccttgattttccggtagccgaggcggcgcagcgtgaatttgattttgcggaccacatcggtcgaggtccagcgcaggggcttgtccagtacggcgatataaccctcttcgaagttgagaccccgcaggtcgatcggttctttcattaacagaaatagcttaggatggatacgaggcccgcggcggcgcagtagagcgcgaaccagatgagtttgccccgcttgacgatttcgatcatgaatttgcaggccagacagcccgtgacgaacgaggcgaggaagcctgcggcgagaggaccggcggccacgccggccgtgaggtcgccgctgacggcttcgagcagcgtctcgcccagaatcggagccagcaccatcaggaacgagaattgcgccacggcggcttttttgttgcccagcaagaggcccgtggcgatggtcgtgcccgaacgcgaaaggcccggcatggcggcgcaggcctgcgcaaggccgatgatgaaggcgtcgcggtaggagatggtctccttctggcggggtttggcgtaataggcgaaagccagcagtgcggccgtcagcagcagcatggcgcccacgatcacgaggatatagggggcgtcgagcagggcgttgatccgctccttgaacaggaagccgacgaagccgatgggaatcatcgagagcacgagtttgagcacgtaggcctgctcggcgttgaaacggcgcgagaagagacccttcaggagacgccacacctcgctccagagtacgacgatggtgctcaggacggtggcggcgtggagcgccacgtcgaaggtgaggttctcttcgagctcgacgcccagcagctctttggcgatctggaggtggccgctgctcgaaacgggcagaaattcggtgatgccctgcacgatgccgagcaggatggcttgtagagtgtccatttacggataagcggggttatgagtcgtcgcggcgaatgccggaccttgggttgcgtgaattatttgtatcttttcaggatggcgtagatttcgatcacgaatccgccgatcaccagaatcggggccagcgtgatgcggcgccatgagaacatcgcgtagttgaactggtcgggcgaatcgctgccgccgccggccatcagcacgaagcccagcaggatcacggcgaagccgatcgccagcaggacgtagttgcggcgggtaagcggcattttggggggttcctgctccgcaggggtgttcttattcgcttttttcatttaataaaggtatatcttgttcgacttcatgttgacgaatttgttgagggccgcgacggtgaagagtcccgatatgacgacgccgcccgcaatcatcgcgccgaggatgatggcgattttgccgctctcggcgatggtcgtcagttcggggaccgcttcgttgagtccgaagaccgaaagcccgaacagcagcgaggcccccagtccggccagtatgccctgcgtgatgctgctgccgaggaagggcttcatgatgaaccacttggtagctccgacgagcttcatcgtgttgatcagatagcgtttcgagaagatcgccagccggatggtgttgctcagcaggatcagcgagatgatcagcagcgcgccgccgaaaagcagcaggacgagccggattttgcccaccgtggcgtgcagccgctcggccatcagcgcgggatagctgacccgctcgacgcccgcgatgccggagacggaggcgatgaagccgtcgaggagctccttgtcggccgactcggccgtgagggtcagctcgaacgagtcgagcagcggattttcgtcgagaatctcctcgaattcgctttcgaacatcttgcggaattcggcgtcgtcggccttctcctccttcgtgacataggcgacggtcgcgaccagctcctcggcggtgagccgtttgttgatcgtttcgcgctgctggtccgagatgccgttttgcagttcgacggtgacggcgatgctctcctgcagggtctgggcgaccttcatcgcggcgaccatcaggtagcctaccgaccccagcaggaacagtacgagcatgatgctgacggtcgatacgatataggagttgcggacttttcgtttaagtctcttgtcgtctttcatagtcttatgcctttttcttgcggaaacagtatgtcagtgccgcggcggcgccgagcaggatcaggagcgacgagacgagcgtcacggcctcggccgcggcccagcccggagcgcggaaccgccactcgacggtgtgccggccggcgggcagtttcatggcgcgcaggatgtagtcggcccggaagccgggcatcgcctcgccgtcgacgtaggccgtccagccgtggtcgtagaatatctccgagaatacggcgaccgactcttcgggggccgtgtattcgtatttctggtagttgggacggtactccgtgagcgcgatgccgcgcacgagcgtcgtatccgcctgtccgcccgcctgccactcctcggcgaacgccttgtcggcgggggcggcgacggccgtcgttttcagatcgacgctgcccaagaggtcgatttcctgctgcggggtgtcggctgcgacgatcccatcgacgaaccacgccggaccgtttgccgtcgcgcggcgcacggcctgcggctgtccgtcgtcgccggggacgatcaggtagcgggtgttgagcatgtcgagcaccgcgtcgttgcggtagctcaggtagcggtcgatcaggtcctgatagcgggccagcttggcgccgtggtagccgccgaccgaacggtggaaataggaggtcgtggcgtcctgaaacgggctgaccgtgaggttgaggacgcggaagcccggatccttgtcggccaagatcgccttgtcggcggccgtggccgtgatctgccggcggcgcgccgaaatgaagtcgtcgtgcgagaggaaccgcaggtccacgggaacgaggtcgagcagcatcaccgcgccgagcagcgccgtgagtgcgtatttgttgattctgcgcagggcgaacagcgccacgccgcccgcggcgagcaggatcatcagcagcgaacgccatgcgtcggcctgcatcatcgaagcgcgttcggcggccatggcgtcggccgtggcgatgcccatttcggcgtccatgccccggtcgaggtattcctgcatgttgttggctttgagtatctggtggaactgctcggtcatcatcgccgcgctctcttcgcggccgaagtcgaagagcgagccgcccgcgacggccagcagcaggcagaggccccccgtgacgcccgcggcccagccgagggccttgaagagccgccggcgcggaatttcgtcgcgccagagccgcatcagcgccagtgcgccgagcaggggaaccgtccactgcacgacgacgagggccatcgagacggtgcggaatttattgtagccggggagccagtcgaaggccagctcggtgaaccacatcaggttgcggccccatgccagcaggagcgtcagcgccgagaccgctacgatccaccacttgttgcggccccggaccagcgcgacgcccagtgcggcgaggaagatcgccgcggcgccgaggtaggtcggaccgccggtatagggctgcgttccccagtaggcgggcagctgctgcgcggcgccccgcagtccgtagtcgttgagcacggcggccacttcgccgtcgggggcgaaggccgtgcccgattcgcggcccatgaagtcgggaaccagcaggttgagactctccgtgcggccgtagctccacgccgtggcgtagtcgagggccagtccgtttttggacgtctcggcggtcgaagccagctcggagccgccgcgcatggtctccttggagtgtttggccgtgtaccagaggggcgagaagttcgagccgacggccagcaggcccgcggcggcgagcacggcggtgcggagcgcgaaattccggaaatgcttctcccggaaggccgtgacaccttcgctgatccagaaggcggccatcgccagcaggaaatagtaggtgatctgcgggtggttggcgccgatttcgagcgacgccgtgagcgccgtgagcgcgcctccggcccacatgttgccccgcagggtcatccacgcgccgcccatcatcagcggggcgtagaccagcgcccacatcttggtgatgtggcctgcgccgatgatgagcaggaaataggtcgaaaggccgtaggccagcgacgcgacgacgcccacccacggattgacgccgaagatcagcagcatgagccacatggccgtcatggcgaaaaagaggaaggcggcgggggtgtcgatgatcttgacgacccggccgagggtgttcttgacgagctgcgccgggtaggccacgttgatcaggtaggcgggcatgccgccgaacatgcggcccgtccactggggatcttcgcccgtggcttcgcgcatgtcgttgatatccttggccatgccgtcgtactgcacgacgtcgtgctggggcagcacctcgccgcggaactgcggggcgaagtagactgcgctcaccacgaagaagagcgcgagggccgccgcggccggcagcagccggcgtatgatcgttttcgaagattccatatttcaagtcgttatccggtggccggagaccgtgcagactcagggcggaagccgcgtgcggtccgcattccgccggggcgcacgctgtctgagtgaacgtgttaagccttcgcaaaggtacgaaaaaacatttacttgacgagcggcgattgcgaaaaatcactatctttgccaaagatatgcggcgacccggtgtgcggggcatttcccgaacaggccttcgctccgggccgtgttgcgtccgttgccgcgaacagaataggctttatgattacact
